(19) United States
(12) Patent Application Publication
(10) Pub. No.: US 2026/0028628 A1
(43) Pub. Date: Jan. 29, 2026

(54) COMPOSITIONS AND METHODS FOR INHIBITION OF EXPRESSION OF INHIBIN SUBUNIT BETA E (INHBE) GENES

(71) Applicant: BASECURE THERAPEUTICS LLC, Dover, DE (US)

(72) Inventors: Jing YANG, Dover, DE (US); Kevin J. KIM, Dover, DE (US); Saul Martinez MONTERO, Dover, DE (US)

(21) Appl. No.: 19/245,022

(22) Filed: Jun. 20, 2025

Related U.S. Application Data
(63) Continuation of application No. PCT/US2024/019416, filed on Mar. 11, 2024.
(60) Provisional application No. 63/489,325, filed on Mar. 9, 2023.

(51) Int. Cl. C12N 15/113

(52) U.S. Cl. CPC C12N 15/1136; C12N 2310/14; C12N 2310/315; C12N 2310/321; C12N 2310/351

(57) ABSTRACT

The disclosure relates to double-stranded ribonucleic acid (dsRNA) targeting an INHBE gene, and methods of using the dsRNA to inhibit expression of INHBE.

### CROSS-REFERENCE

[0001] This application is a continuation application of International Patent Application No. PCT/US2024/019416, which claims the benefit of and priority to U.S. Provisional Patent Application No. 63/489,325, filed Mar. 9, 2023, the disclosures of which are incorporated herein by reference in their entireties.

### SEQUENCE LISTING

[0002] The instant application contains a Sequence Listing which has been submitted electronically in XML format and is hereby incorporated by reference in its entirety. Said XML copy, created on Jun. 20, 2025, is named 139866-5001-US-Sequence Listing.xml, and is 2,433,336 bytes in size.

### FIELD OF THE INVENTION

[0003] The disclosure relates to double-stranded ribonucleic acid (dsRNA) targeting INHBE genes, and methods of using the dsRNA to inhibit expression of INHBE in a cell.

### SUMMARY

[0004] The present disclosure is based, in part, upon the development of double-stranded ribonucleic acid (dsRNA) targeting Inhibin Subunit Beta E (INHBE) genes, pharmaceutical compositions comprising the dsRNAs targeting INHBE genes and methods of using the dsRNA to inhibit expression of INHBE in a cell.

[0005] In some aspects, the disclosure provides for a double-stranded ribonucleic acid (dsRNA) for inhibiting expression of INHBE comprising a sense strand and an antisense strand each 15 to 30 nucleotides in length, wherein: (a) the antisense strand comprises a sequence that is at least 70% or 80% identical to the sequence of SEQ ID NO: 598, and the sense strand comprises a sequence that is at least 70% or 80% identical to the sequence of SEQ ID NO: 589; (b) the antisense strand comprises a sequence that is at least 70% or 80% identical to the sequence of SEQ ID NO: 599, and the sense strand comprises a sequence that is at least 70% or 80% identical to the sequence of SEQ ID NO: 590; (c) the antisense strand comprises a sequence that is at least 70% or 80% identical to the sequence of SEQ ID NO: 600, and the sense strand comprises a sequence that is at least 70% or 80% identical to the sequence of SEQ ID NO: 591; (d) the antisense strand comprises a sequence that is at least 70% or 80% identical to the sequence of SEQ ID NO: 601, and the sense strand comprises a sequence that is at least 70% or 80% identical to the sequence of SEQ ID NO: 592; (e) the antisense strand comprises a sequence that is at least 70% or 80% identical to the sequence of SEQ ID NO: 602, and the sense strand comprises a sequence that is at least 70% or 80% identical to the sequence of SEQ ID NO: 593; (f) the antisense strand comprises a sequence that is at least 70% or 80% identical to the sequence of SEQ ID NO: 603, and the sense strand comprises a sequence that is at least 70% or 80% identical to the sequence of SEQ ID NO: 594; (g) the antisense strand comprises a sequence that is at least 70% or 80% identical to the sequence of SEQ ID NO: 604, and the sense strand comprises a sequence that is at least 70% or 80% identical to the sequence of SEQ ID NO: 595; (h) the antisense strand comprises a sequence that is at least 70% or 80% identical to the sequence of SEQ ID NO: 605, and the sense strand comprises a sequence that is at least 70% or 80% identical to the sequence of SEQ ID NO: 596; or (i) the antisense strand comprises a sequence that is at least 70% or 80% identical to the sequence of SEQ ID NO: 606, and the sense strand comprises a sequence that is at least 70% or 80% identical to the sequence of SEQ ID NO: 597. In some aspects, the disclosure provides for a double-stranded ribonucleic acid (dsRNA) for inhibiting expression of INHBE, wherein the dsRNA comprises a sense strand and an antisense strand each 15 to 30 nucleotides in length, wherein: the antisense strand comprises a sequence that is at least 70% or 80% identical to the sequence of SEQ ID NO: 616, and the sense strand comprises a sequence that is at least 70% or 80% identical to the sequence of SEQ ID NO: 607; (b) the antisense strand comprises a sequence that is at least 70% or 80% identical to the sequence of SEQ ID NO: 617, and sense strand comprises a sequence that is at least 70% or 80% identical to the sequence of SEQ ID NO: 608; (c) the antisense strand comprises a sequence that is at least 70% or 80% identical to the sequence of SEQ ID NO: 618, and the sense strand comprises a sequence that is at least 70% or 80% identical to the sequence of SEQ ID NO: 609; (d) the antisense strand comprises a sequence that is at least 70% or 80% identical to the sequence of SEQ ID NO: 619, and the sense strand comprises a sequence that is at least 70% or 80% identical to the sequence of SEQ ID NO: 610; (e) the antisense strand comprises a sequence that is at least 70% or 80% identical to the sequence of SEQ ID NO: 620, and the sense strand comprises a sequence that is at least 70% or 80% identical to the sequence of SEQ ID NO: 611; (f) the antisense strand comprises a sequence that is at least 70% or 80% identical to the sequence of SEQ ID NO: 621, and the sense strand comprises at least 15 contiguous nucleotides of a sense strand sequence comprising the sequence of SEQ ID NO: 612; (g) the antisense strand comprises at least 15 contiguous nucleotides of an antisense strand sequence comprising the sequence of SEQ ID NO: 622, and the sense strand comprises a sequence that is at least 70% or 80% identical to the sequence of SEQ ID NO: 613; (h) the antisense strand comprises a sequence that is at least 70% or 80% identical to the sequence of SEQ ID NO: 623, and the sense strand comprises a sequence that is at least 70% or 80% identical to the sequence of SEQ ID NO: 614; or (i) the antisense strand comprises a sequence that is at least 70% or 80% identical to the sequence of SEQ ID NO: 624, and the sense strand comprises a sequence that is at least 70% or 80% identical to the sequence of SEQ ID NO: 615.

[0006] In some aspects, the disclosure provides for a double-stranded ribonucleic acid (dsRNA) for inhibiting expression of INHBE comprising a sense strand and an antisense strand each 15 to 30 nucleotides in length, wherein: (a) the antisense strand comprises at least 15 contiguous nucleotides of an antisense strand sequence comprising the sequence of SEQ ID NO: 598, and the sense strand comprises at least 15 contiguous nucleotides of a sense strand sequence comprising the sequence of SEQ ID NO: 589; (b) the antisense strand comprises at least 15 contiguous nucleotides of an antisense strand sequence comprising the sequence of SEQ ID NO: 599, and the sense strand comprises at least 15 contiguous nucleotides of a sense strand sequence comprising the sequence of SEQ ID NO: 590; (c) the antisense strand comprises at least 15 contiguous nucleotides of an antisense strand sequence comprising the sequence of SEQ ID NO: 600, and the sense strand comprises at least 15 contiguous nucleotides of a sense strand sequence comprising the sequence of SEQ ID NO: 591; (d) the antisense strand comprises at least 15 contiguous nucleotides of an antisense strand sequence comprising the sequence of SEQ ID NO: 601, and the sense strand comprises at least 15 contiguous nucleotides of a sense strand sequence comprising the sequence of SEQ ID NO: 592; (e) the antisense strand comprises at least 15 contiguous nucleotides of an antisense strand sequence comprising the sequence of SEQ ID NO: 602, and the sense strand comprises at least 15 contiguous nucleotides of a sense strand sequence comprising the sequence of SEQ ID NO: 593; (f) the antisense strand comprises at least 15 contiguous nucleotides of an antisense strand sequence comprising the sequence of SEQ ID NO: 603, and the sense strand comprises at least 15 contiguous nucleotides of a sense strand sequence comprising the sequence of SEQ ID NO: 594; (g) the antisense strand comprises at least 15 contiguous nucleotides of an antisense strand sequence comprising the sequence of SEQ ID NO: 604, and the sense strand comprises at least 15 contiguous nucleotides of a sense strand sequence comprising the sequence of SEQ ID NO: 595; (h) the antisense strand comprises at least 15 contiguous nucleotides of an antisense strand sequence comprising the sequence of SEQ ID NO: 605, and the sense strand comprises at least 15 contiguous nucleotides of a sense strand sequence comprising the sequence of SEQ ID NO: 596; or (i) the antisense strand comprises at least 15 contiguous nucleotides of an antisense strand sequence comprising the sequence of SEQ ID NO: 606, and the sense strand comprises at least 15 contiguous nucleotides of a sense strand sequence comprising the sequence of SEQ ID NO: 597. In some aspects, the disclosure provides for a double-stranded ribonucleic acid (dsRNA) for inhibiting expression of INHBE, wherein the dsRNA comprises a sense strand and an antisense strand each 15 to 30 nucleotides in length, wherein: the antisense strand comprises at least 15 contiguous nucleotides of an antisense strand sequence comprising the sequence of SEQ ID NO: 616, and the sense strand comprises at least 15 contiguous nucleotides of a sense strand sequence comprising the sequence of SEQ ID NO: 607; (b) the antisense strand comprises at least 15 contiguous nucleotides of an antisense strand sequence comprising the sequence of SEQ ID NO: 617, and the sense strand comprises at least 15 contiguous nucleotides of a sense strand sequence comprising the sequence of SEQ ID NO: 608; (c) the antisense strand comprises at least 15 contiguous nucleotides of an antisense strand sequence comprising the sequence of SEQ ID NO: 618, and the sense strand comprises at least 15 contiguous nucleotides of a sense strand sequence comprising the sequence of SEQ ID NO: 609; (d) the antisense strand comprises at least 15 contiguous nucleotides of an antisense strand sequence comprising the sequence of SEQ ID NO: 619, and the sense strand comprises at least 15 contiguous nucleotides of a sense strand sequence comprising the sequence of SEQ ID NO: 610; (e) the antisense strand comprises at least 15 contiguous nucleotides of an antisense strand sequence comprising the sequence of SEQ ID NO: 620, and the sense strand comprises at least 15 contiguous nucleotides of a sense strand sequence comprising the sequence of SEQ ID NO: 611; (f) the antisense strand comprises at least 15 contiguous nucleotides of an antisense strand sequence comprising the sequence of SEQ ID NO: 621, and the sense strand comprises at least 15 contiguous nucleotides of a sense strand sequence comprising the sequence of SEQ ID NO: 612; (g) the antisense strand comprises at least 15 contiguous nucleotides of an antisense strand sequence comprising the sequence of SEQ ID NO: 622, and the sense strand comprises at least 15 contiguous nucleotides of a sense strand sequence comprising the sequence of SEQ ID NO: 613; (h) the antisense strand comprises at least 15 contiguous nucleotides of an antisense strand sequence comprising the sequence of SEQ ID NO: 623, and the sense strand comprises at least 15 contiguous nucleotides of a sense strand sequence comprising the sequence of SEQ ID NO: 614; or (i) the antisense strand comprises at least 15 contiguous nucleotides of an antisense strand sequence comprising the sequence of SEQ ID NO: 624, and the sense strand comprises at least 15 contiguous nucleotides of a sense strand sequence comprising the sequence of SEQ ID NO: 615.

[0007] In some embodiments, the INHBE gene is human INHBE. In some embodiments, the INHBE is human INHBE comprising the sequence shown in SEQ ID NO: 588 (NM_031479.5).

[0008] In some embodiments, the sense strand is 70%, 80%, 90%, 95% or more identical to the sense strand sequence comprising the sequence of SEQ ID NO: 589, SEQ ID NO: 590, SEQ ID NO: 591, SEQ ID NO: 592, SEQ ID NO: 593, SEQ ID NO: 594, SEQ ID NO: 595, SEQ ID NO: 596, SEQ ID NO: 597, SEQ ID NO: 607, SEQ ID NO: 608, SEQ ID NO: 609, SEQ ID NO: 610, SEQ ID NO: 611, SEQ ID NO: 612, SEQ ID NO: 613, SEQ ID NO: 614, or SEQ ID NO: 615. In some embodiments, the sense strand comprises at least 16, 17, 18, 19, 20, 21, 22, or 23 contiguous nucleotides of a sense strand sequence comprising the sequence of SEQ ID NO: 589, SEQ ID NO: 590, SEQ ID NO: 591, SEQ ID NO: 592, SEQ ID NO: 593, SEQ ID NO: 594, SEQ ID NO: 595, SEQ ID NO: 596, ID NO: 597, SEQ ID NO: 606, SEQ ID NO: 607, SEQ ID NO: 608, SEQ ID NO: 609, SEQ ID NO: 610, SEQ ID NO: 611, SEQ ID NO: 612, SEQ ID NO: 613, SEQ ID NO: 614, or SEQ ID NO: 615. In some embodiments, the sense strand comprises: (a) 20 contiguous nucleotides of a sense strand sequence comprising the sequence of SEQ ID NO: 589, SEQ ID NO: 590, SEQ ID NO: 591, SEQ ID NO: 592, SEQ ID NO: 593, SEQ ID NO: 594, SEQ ID NO: 595, SEQ ID NO: 596, SEQ ID NO: 597, SEQ ID NO: 607, SEQ ID NO: 608, SEQ ID NO: 609, SEQ ID NO: 610, SEQ ID NO: 611, SEQ ID NO: 612, SEQ ID NO: 613, SEQ ID NO: 614, or SEQ ID NO: 615; (b) 21 contiguous nucleotides of a sense strand sequence comprising the sequence of SEQ ID NO: 594, SEQ ID NO: 595, SEQ ID NO: 596, SEQ ID NO: 597, SEQ ID NO: 612, SEQ ID NO: 613, SEQ ID NO: 614, or SEQ ID NO: 615; (c) 22 contiguous nucleotides of a sense strand sequence comprising the sequence of SEQ ID NO: 594, SEQ ID NO: 595, SEQ ID NO: 596, SEQ ID NO: 597, SEQ ID NO: 612, SEQ ID NO: 613, SEQ ID NO: 614, or SEQ ID NO: 615; and/or (d) 23 contiguous nucleotides of a sense strand sequence comprising the sequence of SEQ ID NO: 594 or SEQ ID NO: 612. In some embodiments, the antisense strand comprises at least 16, 17, 18, 19, 20, 21, 22, or 23 contiguous nucleotides of an antisense sense strand sequence comprising the sequence of SEQ ID NO: 598, SEQ ID NO: 599, SEQ ID NO: 600, SEQ ID NO: 601, SEQ ID NO: 602, SEQ ID NO: 603, SEQ ID NO: 604, SEQ ID NO: 605, SEQ ID NO: 606, SEQ ID NO: 616, SEQ ID NO: 617, SEQ ID NO: 618, SEQ ID NO: 619, SEQ ID NO: 620, SEQ ID NO: 621, SEQ ID NO: 622, SEQ ID NO: 623, or SEQ ID NO: 624. In some embodiments, the antisense strand comprises: (a) 21 contiguous nucleotides of an antisense sense strand sequence comprising the sequence of SEQ ID NO: 598, SEQ ID NO: 599, SEQ ID NO: 600, SEQ ID NO: 601, SEQ ID NO: 602, SEQ ID NO: 603, SEQ ID NO: 604, SEQ ID NO: 605, SEQ ID NO: 606, SEQ ID NO: 616, SEQ ID NO: 617, SEQ ID NO: 618, SEQ ID NO: 619, SEQ ID NO: 620, SEQ ID NO: 621, SEQ ID NO: 622, SEQ ID NO: 623, or SEQ ID NO: 624; (b) 22 contiguous nucleotides of an antisense sense strand sequence comprising the sequence of SEQ ID NO: 598, SEQ ID NO: 599, SEQ ID NO: 600, SEQ ID NO: 601, SEQ ID NO: 602, SEQ ID NO: 603, SEQ ID NO: 604, SEQ ID NO: 605, SEQ ID NO: 606, SEQ ID NO: 616, SEQ ID NO: 617, SEQ ID NO: 618, SEQ ID NO: 619, SEQ ID NO: 620, SEQ ID NO: 621, SEQ ID NO: 622, SEQ ID NO: 623, or SEQ ID NO: 624; and/or (c) 23 contiguous nucleotides of an antisense sense strand sequence comprising the sequence of SEQ ID NO: 598, SEQ ID NO: 599, SEQ ID NO: 600, SEQ ID NO: 601, SEQ ID NO: 602, SEQ ID NO: 603, SEQ ID NO: 604, SEQ ID NO: 605, SEQ ID NO: 606, SEQ ID NO: 616, SEQ ID NO: 617, SEQ ID NO: 618, SEQ ID NO: 619, SEQ ID NO: 620, SEQ ID NO: 621, SEQ ID NO: 622, SEQ ID NO: 623, or SEQ ID NO: 624. In some embodiments, the sense strand sequence is selected from a sense strand sequence comprising the sequence of SEQ ID NO: 589, SEQ ID NO: 590, SEQ ID NO: 591, SEQ ID NO: 592, SEQ ID NO: 593, SEQ ID NO: 594, SEQ ID NO: 595, SEQ ID NO: 596, ID NO: 597, SEQ ID NO: 606, SEQ ID NO: 607, SEQ ID NO: 608, SEQ ID NO: 609, SEQ ID NO: 610, SEQ ID NO: 611, SEQ ID NO: 612, SEQ ID NO: 613, SEQ ID NO: 614, or SEQ ID NO: 615, and the antisense strand is selected from an antisense strand sequence comprising the sequence of SEQ ID NO: 598, SEQ ID NO: 599, SEQ ID NO: 600, SEQ ID NO: 601, SEQ ID NO: 602, SEQ ID NO: 603, SEQ ID NO: 604, SEQ ID NO: 605, SEQ ID NO: 606, SEQ ID NO: 616, SEQ ID NO: 617, SEQ ID NO: 618, SEQ ID NO: 619, SEQ ID NO: 620, SEQ ID NO: 621, SEQ ID NO: 622, SEQ ID NO: 623, or SEQ ID NO: 624. In some embodiments, the sense strand sequence is selected from a sense strand sequence comprising the sequence of SEQ ID NO: 589, SEQ ID NO: 590, SEQ ID NO: 591, SEQ ID NO: 592, SEQ ID NO: 593, SEQ ID NO: 594, SEQ ID NO: 595, SEQ ID NO: 596, ID NO: 597, SEQ ID NO: 606, SEQ ID NO: 607, SEQ ID NO: 608, SEQ ID NO: 609, SEQ ID NO: 610, SEQ ID NO: 611, SEQ ID NO: 612, SEQ ID NO: 613, SEQ ID NO: 614, or SEQ ID NO: 615. In some embodiments, the antisense strand is selected from an antisense strand sequence comprising the sequence of SEQ ID NO: 598, SEQ ID NO: 599, SEQ ID NO: 600, SEQ ID NO: 601, SEQ ID NO: 602, SEQ ID NO: 603, SEQ ID NO: 604, SEQ ID NO: 605, SEQ ID NO: 606, SEQ ID NO: 616, SEQ ID NO: 617, SEQ ID NO: 618, SEQ ID NO: 619, SEQ ID NO: 620, SEQ ID NO: 621, SEQ ID NO: 622, SEQ ID NO: 623, or SEQ ID NO: 624. In some embodiments, the antisense strand comprises the sequence of SEQ ID NO: 598 and the sense strand comprises the sequence of SEQ ID NO: 589. In some embodiments, the antisense strand comprises the sequence of SEQ ID NO: 599 and the sense strand comprises the sequence of SEQ ID NO: 590. In some embodiments, the antisense strand comprises the sequence of SEQ ID NO: 600 and the sense strand comprises the sequence of SEQ ID NO: 591. In some embodiments, the antisense strand comprises the sequence of SEQ ID NO: 601 and the sense strand comprises the sequence of SEQ ID NO: 592. In some embodiments, the antisense strand comprises the sequence of SEQ ID NO: 602 and the sense strand comprises the sequence of SEQ ID NO: 593. In some embodiments, the antisense strand comprises the sequence of SEQ ID NO: 603 and the sense strand comprises the sequence of SEQ ID NO: 594. In some embodiments, the antisense strand comprises the sequence of SEQ ID NO: 604 and the sense strand comprises the sequence of SEQ ID NO: 595. In some embodiments, the antisense strand comprises the sequence of SEQ ID NO: 605 and the sense strand comprises the sequence of SEQ ID NO: 596. In some embodiments, the antisense strand comprises the sequence of SEQ ID NO: 606 and the sense strand comprises the sequence of SEQ ID NO: 597. In some embodiments, the antisense strand comprises the sequence of SEQ ID NO: 616 and the sense strand comprises the sequence of SEQ ID NO: 607. In some embodiments, the antisense strand comprises the sequence of SEQ ID NO: 617 and the sense strand comprises the sequence of SEQ ID NO: 608. In some embodiments, the antisense strand comprises the sequence of SEQ ID NO: 618 and the sense strand comprises the sequence of SEQ ID NO: 609. In some embodiments, the antisense strand comprises the sequence of SEQ ID NO: 619 and the sense strand comprises the sequence of SEQ ID NO: 610. In some embodiments, the antisense strand comprises the sequence of SEQ ID NO: 620 and the sense strand comprises the sequence of SEQ ID NO: 611. In some embodiments, the antisense strand comprises the sequence of SEQ ID NO: 621 and the sense strand comprises the sequence of SEQ ID NO: 612. In some embodiments, the antisense strand comprises the sequence of SEQ ID NO: 622 and the sense strand comprises the sequence of SEQ ID NO: 613. In some embodiments, the antisense strand comprises the sequence of SEQ ID NO: 623 and the sense strand comprises the sequence of SEQ ID NO: 614. In some embodiments, the antisense strand comprises the sequence of SEQ ID NO: 624 and the sense strand comprises the sequence of SEQ ID NO: 615. In some embodiments, at least one nucleotide of the dsRNA is a modified nucleotide selected from the group consisting of: a 5′-vinyl phosphonate nucleotide, a 2′-O-methyl modified nucleotide, an inverted deoxyribonucleotide (3′-3′ linked nucleotide or 5′-5′ linked nucleotide), a nucleotide comprising a 5′-phosphorothioate group, a 2′-fluoro modified nucleotide, a nucleotide comprising a modified nucleotide component represented by Formula (I):

[chemical structure]

and a nucleotide comprising a modified nucleotide component represented by Formula (II):

[chemical structure]

wherein: each of B¹ and B² is a nucleobase; and R¹ is selected from the group consisting of hydrogen and C₁₋₆ alkyl; optionally wherein the antisense strand and the sense strand each comprise at least one modified nucleotide.

[0009] In some embodiments, the antisense strand has a 3′ end nucleotide overhang compared to the sense strand. In some embodiments, the 3′ end nucleotide overhang comprises 1, 2, or 3 nucleotides compared to the sense strand. In some embodiments, the antisense and the sense strand are at least 70%, 75%, 80%, 85%, 90%, 95%, or 100% complementary. In some embodiments, the antisense strand and the sense strand are at least 80% complementary. In some embodiments, the antisense strand and the sense strand comprise at least one, at least two, at least three, or at least four mismatched nucleotides. In some embodiments, the antisense strand comprises a nucleotide sequence that is at least about 60%, 65%, 70%, 75%, 80%, 85%, 90%, 95% or 100% identical to a target mRNA corresponding to a fragment of INHBE mRNA. In some embodiments, the antisense strand of the dsRNA comprises at least 80% complementarity to the fragment of the INHBE mRNA. In some embodiments, the antisense strand of the dsRNA comprises one, two, three, or four mismatches to the fragment of the INHBE mRNA.n some embodiments, at least one nucleotide of the dsRNA is a modified nucleotide. In some embodiments, the modified nucleotide is at least one of a modified nucleotide selected from the group consisting of a 2′-O-methyl modified nucleotide, a nucleotide comprising a 5′-phosphorothioate group, a 2′-fluoro modified nucleotide; an inverted abasic nucleotide, a thymidine-glycol nucleic acid (GNA)S-Isomer; an inosine, and inverted deoxyribonucleotide (3′-3′ linked nucleotide or 5′-5′ linked nucleotide), a thymidine-glycol nucleic acid (GNA)S-Isomer, a nucleotide comprising a modified nucleotide component represented by Formula (I):

[chemical structure]

and a nucleotide comprising a modified nucleotide component represented by Formula (II):

[chemical structure]

wherein: each of B¹ and B² is a nucleobase; and R¹ is selected from the group consisting of hydrogen and C₁₋₆ alkyl; optionally wherein the antisense strand and the sense strand each comprise at least one modified nucleotide, and a nucleotide comprising a modified nucleotide component represented by Formula (II). In some embodiments, each of B¹ and B² is independently selected from the group consisting of adenine, uracil, thymine, cytosine, guanine, and modified analogs thereof. In some embodiments, each of B¹ and B² is independently selected from adenine, uracil, cytosine, and modified analogs thereof. In some embodiments, R¹ is C₁₋₆ alkyl. In some embodiments, wherein R¹ is —CH₃. In some embodiments, B¹ is uracil. In some embodiments, R¹ is —CH₃ and B¹ is uracil. In some embodiments, B² is adenine. In some embodiments, B² is uracil. In some embodiments, the sense strand comprises an inverted deoxyribonucleotide at the 5′ end; optionally wherein the inverted deoxyribonucleotide is a 5′-5′ linked deoxythymidine. In some embodiments, the sense strand comprises an inverted deoxyribonucleotide at the 3′ end; optionally wherein the inverted deoxyribonucleotide is a 3′-3′ linked deoxythymidine. In some embodiments, the sense strand comprises an inverted deoxyribonucleotide at the 5′ end and an inverted deoxyribonucleotide at the 3′ end; optionally wherein the inverted deoxyribonucleotide at the 5′ end is a 5′-5′ linked deoxythymidine and the inverted deoxyribonucleotide at the 3′ end is a 3′-3′ linked deoxythymidine. In some embodiments, the sense strand comprises a nucleotide comprising the modified nucleotide component represented by Formula (I) at the 3′ end; optionally wherein R¹ is —CH₃ and B¹ is uracil.

[0010] In some embodiments, the modified nucleotide is at least one of 5′-vinyl phosphonate nucleotide, a 5′-phosphate or phosphate mimic, a locked nucleic acid (LNA), a 2′-MOE (methoxyethyl)nucleotide, and/or a 2′-arabino fluoro (2′-araF) nucleotide. In some embodiments, the antisense strand comprises a phosphate mimic at the 5′ end; optionally wherein the phosphate mimic is a 5′-E-Vinyl-phosphonate or a 4′-O-phosphonate. In some embodiments, the modified nucleotide is at least one of: a 2′-deoxy-2′-fluoro modified nucleotide, a 2′-deoxy-modified nucleotide, a locked nucleotide, an abasic nucleotide, 2′-amino-modified nucleotide, 2′-alkyl-modified nucleotide, morpholino nucleotide, a phosphoramidate, and/or a non-natural base comprising nucleotide.

[0011] In some embodiments, the antisense strand and/or the sense strand comprises at least one internucleoside linkage selected from the group consisting of a phosphorothioate linkage, a phosphorodithioate linkage, a phosphotriester linkage, an alkylphosphonate linkage, an aminoalkylphosphotriester linkage, an alkylene phosphonate linkage, a phosphinate linkage, a phosphoramidate linkage, a phosphoromorpholidate linkage, a phosphoropiperazidate linkage, an aminoalkylphosphoramidate linkage, a thiophosphoramidate linkage, a thionoalkylphosphonate linkage, a thionoalkylphosphotriester linkage, a thiophosphate linkage, a selenophosphate linkage, and a boranophosphate linkage. In some embodiments, the antisense strand and/or the sense strand comprises at least one nucleotide modified linkage. In some embodiments, all the nucleotide linkages in the antisense strand are modified linkages. In some embodiments, the antisense strand and/or the sense strand comprises at least one a phosphorothioate (PS) bond.

[0012] In some embodiments, the dsRNA further comprises a ligand or targeting moiety. In some embodiments, the ligand or targeting moiety is conjugated to the 5′ end, 3′ end or both ends of the dsRNA. In some embodiments, the ligand or targeting moiety is conjugated to the 3′ end of the sense strand of the dsRNA. In some embodiments, the ligand or targeting moiety is conjugated to the 5′ end of the sense strand of the dsRNA. In some embodiments, ligand or targeting moiety is at least one N-Acetyl-Galactosamine (GalNAc). In some embodiments, the ligand or targeting moiety is represented by represented by Formula (I):

[chemical structure]

or a pharmaceutically acceptable salt thereof, wherein: A¹ is the point of attachment to the dsRNA; each occurrence of T¹ and T² is independently selected from 5-membered heterocyclyl and alkylene; each occurrence of X is selected from the group consisting of —OH and —SH; and each occurrence of L is a linker; LA is absent or a linker; and n is an integer from 1 to 6. In some embodiments, each occurrence of T¹ and T² is independently selected from 5-membered heterocyclyl having at least one ring oxygen and C₁₋₆ alkylene. In some embodiments, the compound is represented by Formula (I-A):

[chemical structure]

or a pharmaceutically acceptable salt thereof. In some embodiments, the compound is represented by Formula (I-A-I):

[chemical structure]

or a pharmaceutically acceptable salt thereof. In some embodiments, the compound is represented by Formula (I-A-II):

[chemical structure]

or a pharmaceutically acceptable salt thereof, wherein each occurrence of a and b is an integer from 1-20. In some embodiments, the ligand or targeting moiety is tri-GalNAc6. In some embodiments, the ligand or targeting moiety is L96.

[0013] In some embodiments, a cell comprising a dsRNA of the disclosure is provided. In some embodiments, a vector encoding at least one unmodified strand a dsRNA of the disclosure is provided, optionally both strands. of the disclosure is provided a cell comprising the vector is provided.

[0014] In some embodiments, a pharmaceutical composition for inhibiting expression of INHBE comprising the dsRNA and a pharmaceutically acceptable carrier, diluent, excipient, or combination thereof of the disclosure is provided.

[0015] In some embodiments, a method of inhibiting INHBE expression in a cell is provided, the method comprising (a) contacting the cell with the dsRNA of the disclosure or the pharmaceutical composition of the disclosure; and (b) maintaining the cell produced in step (a) for a time sufficient to obtain degradation of the mRNA transcript of an INHBE gene, thereby inhibiting expression of the INHBE gene in the cell, optionally wherein the method is in vivo. In some embodiments, the INHBE expression is inhibited by at least 30% relative to a control.

[0016] In some embodiments, a method of treating a disorder mediated by or associated with INHBE is provided, comprising administering to a subject in need of such treatment a therapeutically effective amount of a dsRNA of the disclosure, or a pharmaceutical composition of the disclosure. In some embodiments, the disorder is a cardiovascular disorder. In some embodiments, the disorder is cardiovascular disease.

### BRIEF DESCRIPTION OF THE DRAWINGS

[0017] The novel features of the invention are set forth with particularity in the appended claims. A better understanding of the features and advantages of the present invention will be obtained by reference to the following detailed description that sets forth illustrative embodiments, in which the principles of the invention are utilized, and the accompanying drawings of which:

[0018] FIGS. 1A-C show bar graphs of the percent (%) inhibition of INHBE mRNA in Huh-7 cells transfected with the indicated GalNAc conjugated, modified siRNA at 10 nM, and 0.1 nM, relative to INHBE mRNA in mock-treated cells. INHBE mRNA level measured by quantitative PCR and normalized to GAPDH.

[0019] FIG. 2 shows graphs of exemplary INHBE siRNA compounds in Huh7 cell line in a single dose screen at 100 nM, 33 nM, 11 nM, 3.7 nM, 1.2 nM, 0.412 nM, 0.137 nM, and 0.046 nM of the selected siRNA. INHBE mRNA level was measured by quantitative PCR and normalized to GAPDH relative to mock treated control cells and the average KD and SD was determined.

[0020] FIG. 3 shows a bar graph of the percent (%) knockdown of INHBE mRNA in human hepatocytes cells treated with indicated GalNAc conjugated, modified siRNA at 10 nM, and 1 nM relative to INHBE mRNA in PBS treated cells. INHBE mRNA level measured by quantitative PCR and normalized to GAPDH.

[0021] FIG. 4 shows a graph of the relative expression of human INHBE mRNA in hydrodynamic injection model with the indicated 13 conjugated, modified siRNA at 1 mg/kg, relative to INHBE expression in PBS treated mice. INHBE mRNA levels were measured by quantitative PCR and normalized to NEO.

[0022] FIG. 5 shows a graph of the relative expression of human INHBE mRNA in hydrodynamic injection model with the indicated 12 conjugated, modified siRNA at 1 mg/kg or 1.5 mg/kg, relative to INHBE expression in PBS treated mice. INHBE mRNA levels were measured by quantitative PCR and normalized to NEO.

[0023] FIG. 6 shows a bar graph of the relative expression of INHBE mRNA in a non-human primate model treated with siRNA Compounds A and B at 5 mg/kg. INHBE mRNA levels were measured via quantitative PCR using liver biopsy samples, and normalized to INHBE expression level at day −4 for each individual animal.

[0024] FIGS. 7A-7C show graphs depicting the agonistic activity of tested compounds in a cell-based hTLR7 reporter assay (FIG. 7A), hTLR8 reporter assay (FIG. 7B), and hTLR9 reporter assay (FIG. 7C). For each graph, the y-axis shows the level of activity as a fold change over unstimulated cells. The x-axis shows the concentration of each compound in nM (log 10 scale).

[0025] FIG. 8 shows a volcano plot of differentially expresses genes (DEGs) among different groups in primary human hepatocyte (PHH) cells treated with indicated exemplary siRNA compounds. The x-axis represents the log 2 (FoldChange), while y-axis represents statistical significance for each gene.

[0026] FIG. 9 shows graphs depicting the biochemical tests of mice over 7 days after receipt of a single dose of PBS control or siRNA compound 100635, 100642, or 100643. The mean plasma concentration of alanine aminotransferase (ALT), aspartate aminotransferase (AST), triglycerides (TRIG), low-density lipoprotein cholesterol (LDL-C), high-density lipoprotein cholesterol (HDL-C), creatinine (CREZ), cholesterol (CHOL), lactate dehydrogenase (LDH), urine micro total protein (UP), and plasma urea (UREA) is shown.

### DETAILED DESCRIPTION

[0027] The details of one or more embodiments of the invention are set forth in the description below. Other features, objects, and advantages of the invention will be apparent from the description, the drawings, and from the claims.

[0028] The disclosure provides dsRNA oligonucleotides and methods of using the dsRNA oligonucleotides for inhibiting the expression of a Lipoprotein(A) (INHBE) gene in a cell or a mammal where the dsRNA oligonucleotide targets a INHBE gene. The disclosure also provides compositions and methods for treating pathological conditions and diseases in a mammal caused by the expression of a INHBE gene, e.g., cardiovascular disease. An INHBE dsRNA oligonucleotide directs the sequence-specific degradation of INHBE mRNA.

### I. Definitions

[0029] For convenience, the meaning of certain terms and phrases used in the specification, examples, and appended claims, are provided below. If there is an apparent discrepancy between the usage of a term in other parts of this specification and its definition provided in this section, the definition in this section shall prevail.

[0030] As used herein, all numerical values or numerical ranges comprise whole integers within or encompassing such ranges and fractions of the values or the integers within or encompassing ranges unless the context clearly indicates otherwise. Thus, for example, reference to a range of 90-100%, comprises 91%, 92%, 93%, 94%, 95%, 95%, 97%, etc., as well as 91.1%, 91.2%, 91.3%, 91.4%, 91.5%, etc., 92.1%, 92.2%, 92.3%, 92.4%, 92.5%, etc., and so forth. In another example, reference to a range of 1-5,000-fold comprises 1-, 2-, 3-, 4-, 5-, 6-, 7-, 8-, 9-, 10-, 11-, 12-, 13-, 14-, 15-, 16-, 17-, 18-, 19-, or 20-fold, etc., as well as 1.1-, 1.2-, 1.3-, 1.4-, or 1.5-fold, etc., 2.1-, 2.2-, 2.3-, 2.4-, or 2.5-fold, etc., and so forth.

[0031] The articles “a” and “an” are used herein to refer to one or to more than one (i.e., to at least one) of the grammatical object of the article. By way of example, “an element” means one element or more than one element, e.g., a plurality of elements.

[0032] The term “including” is used herein to mean, and is used interchangeably with, the phrase “including but not limited to”.

[0033] The term “about” is used herein to mean within the typical ranges of tolerances in the art. For example, “about” can be understood as about 2 standard deviations from the mean. In certain embodiments, about means ±10%. In certain embodiments, about means ±5%. When about is present before a series of numbers or a range, it is understood that “about” can modify each of the numbers in the series or range

[0034] The term “at least” prior to a number or series of numbers is understood to include the number adjacent to the term “at least”, and all subsequent numbers or integers that could logically be included, as clear from context. For example, the number of nucleotides in a nucleic acid molecule must be an integer. For example, “at least 19 nucleotides of a 21 nucleotide nucleic acid molecule” means that 19, 20, or 21 nucleotides have the indicated property. When at least is present before a series of numbers or a range, it is understood that “at least” can modify each of the numbers in the series or range.

[0035] As used herein, “no more than” or “less than” is understood as the value adjacent to the phrase and logical lower values or integers, as logical from context, to zero. For example, a duplex with an overhang of “no more than 2 nucleotides” has a 2, 1, or 0 nucleotide overhang. When “no more than” is present before a series of numbers or a range, it is understood that “no more than” can modify each of the numbers in the series or range. As used herein, ranges include both the upper and lower limit.

[0036] “G,” “C,” “A” and “U” each generally stand for a nucleotide that contains guanine, cytosine, adenine, and uracil as a base, respectively. “T” and “dT” are used interchangeably herein and refer to a deoxyribonucleotide wherein the nucleobase is thymine, e.g., deoxyribothymine. However, it will be understood that the term “ribonucleotide” or “nucleotide” or “deoxyribonucleotide” can also refer to a modified nucleotide, as further detailed below, or a surrogate replacement moiety. The skilled person is well aware that guanine, cytosine, adenine, and uracil may be replaced by other moieties without substantially altering the base pairing properties of an oligonucleotide comprising a nucleotide bearing such replacement moiety. For example, without limitation, a nucleotide comprising inosine as its base may base pair with nucleotides containing adenine, cytosine, or uracil. Hence, nucleotides containing uracil, guanine, or adenine may be replaced in the nucleotide sequences of the disclosure by a nucleotide containing, for example, inosine. Sequences comprising such replacement moieties are embodiments of the disclosure.

[0037] “INHBE” refers to the Inhibin Subunit Beta E gene. According to the NCBI NLM website, this gene encodes his gene encodes a member of the TGF-beta (transforming growth factor-beta) superfamily of proteins. The encoded preproprotein is proteolytically processed to generate an inhibin beta subunit. Inhibins have been implicated in regulating numerous cellular processes including cell proliferation, apoptosis, immune response and hormone secretion. This gene may be upregulated under conditions of endoplasmic reticulum stress, and this protein may inhibit cellular proliferation and growth in pancreas and liver. A human INHBE mRNA sequence is GenBank accession number NM_031479.5, included herein as SEQ ID NO: 588. A rhesus monkey (Macaca mulatta) INHBE mRNA sequence is GenBank accession number XM_028847001.1.

[0038] As used herein, “target sequence” refers to a contiguous portion of the nucleotide sequence of an mRNA molecule formed during the transcription of a INHBE gene, including mRNA that is a product of RNA processing of a primary transcription product.

[0039] As used herein, the term “strand comprising a sequence” refers to an oligonucleotide comprising a chain of nucleotides that is described by the sequence referred to using the standard nucleotide nomenclature.

[0040] As used herein, and unless otherwise indicated, the term “complementary,” when used to describe a first nucleotide sequence in relation to a second nucleotide sequence, refers to the ability of an oligonucleotide or polynucleotide comprising the first nucleotide sequence to hybridize and form a duplex structure under certain conditions with an oligonucleotide or polynucleotide comprising the second nucleotide sequence, as will be understood by the skilled person.

[0041] For example, a first nucleotide sequence can be described as complementary to a second nucleotide sequence when the two sequences hybridize (e.g., anneal) under stringent hybridization conditions. Hybridization conditions include temperature, ionic strength, pH, and organic solvent concentration for the annealing and/or washing steps. The term stringent hybridization conditions refers to conditions under which a first nucleotide sequence will hybridize preferentially to its target sequence, e.g., a second nucleotide sequence, and to a lesser extent to, or not at all to, other sequences. Stringent hybridization conditions are sequence dependent, and are different under different environmental parameters. Generally, stringent hybridization conditions are selected to be about 5° C. lower than the thermal melting point (Tₘ) for the nucleotide sequence at a defined ionic strength and pH. The Tₘ is the temperature (under defined ionic strength and pH) at which 50% of the first nucleotide sequences hybridize to a perfectly matched target sequence. An extensive guide to the hybridization of nucleic acids is found in, e.g., Tijssen (1993) Laboratory Techniques in Biochemistry and Molecular Biology—Hybridization with Nucleic Acid Probes part I, chap. 2, “Overview of principles of hybridization and the strategy of nucleic acid probe assays,” Elsevier, N.Y. (“Tijssen”).

[0042] Other conditions, such as physiologically relevant conditions as may be encountered inside an organism, can apply. The skilled person will be able to determine the set of conditions most appropriate for a test of complementarity of two sequences in accordance with the ultimate application of the hybridized nucleotides.

[0043] This includes base-pairing of the oligonucleotide or polynucleotide comprising the first nucleotide sequence to the oligonucleotide or polynucleotide comprising the second nucleotide sequence over the entire length of the first and second nucleotide sequence. Such sequences can be referred to as “fully complementary” with respect to each other herein. However, where a first sequence is referred to as “substantially complementary” with respect to a second sequence herein, the two sequences can be fully complementary, or they may form one or more, but generally not more than 4, 3, or 2 mismatched base pairs upon hybridization, while retaining the ability to hybridize under the conditions most relevant to their ultimate application. However, where two oligonucleotides are designed to form, upon hybridization, one or more single stranded overhangs, such overhangs shall not be regarded as mismatches with regard to the determination of complementarity. For example, a dsRNA comprising one oligonucleotide 21 nucleotides in length and another oligonucleotide 23 nucleotides in length, wherein the longer oligonucleotide comprises a sequence of 21 nucleotides that is fully complementary to the shorter oligonucleotide, may yet be referred to as “fully complementary” for the purposes described herein.

[0044] “Complementary” sequences, as used herein, may also include, or be formed entirely from, non-Watson-Crick base pairs and/or base pairs formed from non-natural and modified nucleotides, in as far as the above requirements with respect to their ability to hybridize are fulfilled. Such non-Watson-Crick base pairs includes, but not limited to, G:U Wobble or Hoogsteen base pairing.

[0045] The terms “complementary,” “fully complementary” and “substantially complementary” herein may be used with respect to the base matching between the sense strand and the antisense strand of a dsRNA, or between the antisense strand of a dsRNA and a target sequence, as will be understood from the context of their use.

[0046] As used herein, a polynucleotide that is “substantially complementary to at least part of” a messenger RNA (mRNA) refers to a polynucleotide that is substantially complementary to a contiguous portion of the mRNA of interest (e.g., an mRNA encoding INHBE) including a 5′ UTR, an open reading frame (ORF), or a 3′ UTR. For example, a polynucleotide is complementary to at least a part of an INHBE mRNA if the sequence is substantially complementary to a non-interrupted portion of an mRNA encoding INHBE.

[0047] In one embodiment, the antisense strand of the dsRNA is sufficiently complementary to a target mRNA so as to cause cleavage of the target mRNA.

[0048] The term “double-stranded RNA” or “dsRNA,” as used herein, refers to a complex of ribonucleic acid molecules, having a duplex structure comprising two anti-parallel and substantially complementary, as defined above, nucleic acid strands. In general, the majority of nucleotides of each strand are ribonucleotides, but as described in detail herein, each or both strands can also include at least one non-ribonucleotide, e.g., a deoxyribonucleotide and/or a modified nucleotide. In addition, as used in this specification, “dsRNA” may include chemical modifications to ribonucleotides, including substantial modifications at multiple nucleotides and including all types of modifications disclosed herein or known in the art. Any such modifications, as used in an siRNA type molecule, are encompassed by “dsRNA” for the purposes of this specification and claims.

[0049] The two strands forming the duplex structure may be different portions of one larger RNA molecule, or they may be separate RNA molecules. Where the two strands are part of one larger molecule, and therefore are connected by an uninterrupted chain of nucleotides between the 3′-end of one strand and the 5′-end of the respective other strand forming the duplex structure, the connecting RNA chain is referred to as a “hairpin loop.” Where the two strands are connected covalently by means other than an uninterrupted chain of nucleotides between the 3′-end of one strand and the 5′-end of the respective other strand forming the duplex structure, the connecting structure is referred to as a “linker.” The RNA strands may have the same or a different number of nucleotides. The maximum number of base pairs is the number of nucleotides in the shortest strand of the dsRNA minus any overhangs that are present in the duplex. In addition to the duplex structure, a dsRNA may comprise one or more nucleotide overhangs. The term “siRNA” is also used herein to refer to a dsRNA as described above.

[0050] As used herein, a “nucleotide overhang” refers to the unpaired nucleotide or nucleotides that protrude from the duplex structure of a dsRNA when a 3′-end of one strand of the dsRNA extends beyond the 5′-end of the other strand, or vice versa. “Blunt” or “blunt end” means that there are no unpaired nucleotides at that end of the dsRNA, i.e., no nucleotide overhang. A “blunt ended” dsRNA is a dsRNA that is double-stranded over its entire length, i.e., no nucleotide overhang at either end of the molecule.

[0051] The term “antisense strand” refers to the strand of a dsRNA which includes a region that is substantially complementary to a target sequence. As used herein, the term “region of complementarity” refers to the region on the antisense strand that is substantially complementary to a sequence, for example a target sequence, as defined herein. Where the region of complementarity is not fully complementary to the target sequence, the mismatches are most tolerated in the terminal regions and, if present, are generally in a terminal region or regions, e.g., within 6, 5, 4, 3, or 2 nucleotides of the 5′ and/or 3′ terminus.

[0052] The term “sense strand,” as used herein, refers to the strand of a dsRNA that includes a region that is substantially complementary to a region of the antisense strand.

[0053] “Introducing into a cell,” when referring to a dsRNA, means facilitating uptake or absorption into the cell, as is understood by those skilled in the art. Absorption or uptake of dsRNA can occur through unaided diffusive or active cellular processes, or by auxiliary agents or devices. The meaning of this term is not limited to cells in vitro; a dsRNA may also be “introduced into a cell,” wherein the cell is part of a living organism. In such instance, introduction into the cell will include the delivery to the organism. For example, for in vivo delivery, dsRNA can be injected into a tissue site or administered systemically. In vitro introduction into a cell includes methods known in the art such as electroporation and lipofection. Further approaches are described herein or known in the art.

[0054] The terms “silence,” “inhibit the expression of,” “down-regulate the expression of,” “suppress the expression of” and the like in as far as they refer to a INHBE gene, herein refer to the at least partial suppression of the expression of a INHBE gene, as manifested by a reduction of the amount of mRNA which may be isolated from a first cell or group of cells in which a INHBE gene is transcribed and which has or have been treated such that the expression of a INHBE gene is inhibited, as compared to a second cell or group of cells substantially identical to the first cell or group of cells but which has or have not been so treated (control cells). The degree of inhibition is usually expressed in terms of

$$\frac{( mRNA in control cells ) - ( mRNA in treated cells )}{( mRNA in control cells )} \cdot 100 \%$$

[0055] Alternatively, the degree of inhibition may be given in terms of a reduction of a parameter that is functionally linked to INHBE gene expression, e.g., the amount of protein encoded by an INHBE gene which is secreted by a cell, the level of plasma lipid levels or the number of cells displaying a certain phenotype. In principle, INHBE gene silencing may be determined in any cell expressing the target, either constitutively or by genomic engineering, and by any appropriate assay. However, when a reference is needed in order to determine whether a given dsRNA inhibits the expression of an INHBE gene by a certain degree and therefore is encompassed by of the disclosure, the assays provided in the Examples below shall serve as such reference.

[0056] For example, in certain instances, expression of a INHBE gene is suppressed by at least about 5%, 10%, 15%, 20%, 25%, 30%, 35%, 40%, 45%, or 50% by administration of the double-stranded oligonucleotide of the disclosure. In some embodiments, a INHBE gene is suppressed by at least about 60%, 70%, or 80% by administration of the double-stranded oligonucleotide of the disclosure. In some embodiments, a INHBE gene is suppressed by at least about 85%, 90%, or 95% by administration of the double-stranded of the disclosure.

[0057] As used herein, in the context of INHBE expression, the terms “treat,” “treatment,” and the like, refer to relief from or alleviation of pathological processes mediated by INHBE expression. In the context of the present disclosure insofar as it relates to any of the other conditions recited herein below (other than pathological processes mediated by INHBE expression), the terms “treat,” “treatment,” and the like mean to relieve or alleviate at least one symptom associated with such condition, or to slow or reverse the progression of such condition.

[0058] As used herein, the phrases “effective amount” refers to an amount that provides a therapeutic benefit in the treatment, prevention, or management of pathological processes mediated by INHBE expression or an overt symptom of pathological processes mediated by INHBE expression. The specific amount that is effective can be readily determined by an ordinary medical practitioner, and may vary depending on factors known in the art, such as, for example, the type of pathological processes mediated by INHBE expression, the patient's history and age, the stage of pathological processes mediated by INHBE expression, and the administration of other anti-pathological processes mediated by INHBE expression agents.

[0059] As used herein, a “pharmaceutical composition” comprises a pharmacologically effective amount of a dsRNA and a pharmaceutically acceptable carrier. As used herein, “pharmacologically effective amount,” “therapeutically effective amount” or simply “effective amount” refers to that amount of an RNA effective to produce the intended pharmacological, therapeutic or preventive result. For example, if a given clinical treatment is considered effective when there is at least a 25% reduction in a measurable parameter associated with a disease or disorder, a therapeutically effective amount of a drug for the treatment of that disease or disorder is the amount necessary to effect at least a 25% reduction in that parameter. For example, a therapeutically effective amount of a dsRNA targeting INHBE can reduce INHBE serum levels by at least 25%.

[0060] The term “pharmaceutically acceptable carrier” refers to a carrier for administration of a therapeutic agent. Such carriers include, but are not limited to, saline, buffered saline, dextrose, water, glycerol, ethanol, and combinations thereof. The term specifically excludes cell culture medium. For drugs administered orally, pharmaceutically acceptable carriers include, but are not limited to pharmaceutically acceptable excipients such as inert diluents, disintegrating agents, binding agents, lubricating agents, sweetening agents, flavoring agents, coloring agents and preservatives. Suitable inert diluents include sodium and calcium carbonate, sodium and calcium phosphate, and lactose, while corn starch and alginic acid are suitable disintegrating agents. Binding agents may include starch and gelatin, while the lubricating agent, if present, will generally be magnesium stearate, stearic acid or talc. If desired, the tablets may be coated with a material such as glyceryl monostearate or glyceryl distearate, to delay absorption in the gastrointestinal tract.

[0061] As used herein, “tri-GalNAc6” refers to the structure:

[chemical structure]

[0062] As used herein, “L96 ligand” or “L96” refers to the structure:

[chemical structure]

### II. Double-Stranded Ribonucleic Acids (dsRNA)

[0063] In one aspect of the disclosure, provided herein are double-stranded ribonucleic acid (dsRNA) molecules for inhibiting the expression of an INHBE gene e.g., in a cell within a subject, such as a mammal (for example a human.) The use of these dsRNA oligonucleotides enables the targeted degradation of mRNAs of the corresponding gene (INHBE gene) in mammals.

[0064] In certain embodiments, the dsRNA comprises an antisense strand having a region of complementarity which is complementary to at least a part of an mRNA or an mRNA fragment formed in the expression of a INHBE gene. In some embodiments, the dsRNA comprises at least 70% complementarity to the mRNA or the fragment mRNA of human INHBE mRNA.

[0065] In certain embodiments, the dsRNA comprises a sense strand and an antisense strand each 15 to 30 nucleotides in length, wherein the antisense strand comprises at least 15 contiguous nucleotides of an antisense strand sequence shown in Table 1 and Table 2. In certain embodiments, the dsRNA comprises a sense strand and an antisense strand each 15 to 30 nucleotides in length, wherein the antisense strand comprises a sequence that is at least 70% or 80% identical to an antisense strand sequence shown in Table 1 and Table 2. In some embodiments, the dsRNA is Compound 100494, 100506, 100509, 100535, 100557, 100561, 100563, 100563, 100569, 100580, 100589, 100604, 100613, 100625, and 100629. In certain embodiments, the dsRNA comprises a sense strand and an antisense strand each 15 to 30 nucleotides in length, wherein the antisense strand comprises at least 15 contiguous nucleotides of an antisense strand sequence shown in Table 6 and Table 7. In certain embodiments, the dsRNA comprises a sense strand and an antisense strand each 15 to 30 nucleotides in length, wherein the antisense strand comprises a sequence that is at least 70% or 80% identical to an antisense strand sequence shown in Table 6 and Table 7. In some embodiments, the dsRNA is Compound 100635, 100636, 100637, 100638, 100639, 100640, 100641, 100642, 100643, 100644, 100645, 100646, and 100647. In certain embodiments, the dsRNA comprises a sense strand and an antisense strand each 15 to 30 nucleotides in length, wherein the antisense strand comprises at least 15 contiguous nucleotides of an antisense strand sequence shown in Table 9 and Table 10. In certain embodiments, the dsRNA comprises a sense strand and an antisense strand each 15 to 30 nucleotides in length, wherein the antisense strand comprises a sequence that is at least 70% or 80% identical to an antisense strand sequence shown in Table 9 and Table 10. In some embodiments, the dsRNA is Compound 100643, 100647, 100648, 100649, 100650, 100651, 100652, 100653, 100654, 100655, 100656, and 100657. In some embodiments, the INHBE is human INHBE. In some embodiments, the INHBE is human INHBE comprising the sequence shown in SEQ ID NO: 588 (NM_031479.5).

[0066] In some embodiments, the sense strand is 70%, 80%, 90%, 95%, or more identical to the sense strands listed in Table 1 and Table 2. In some embodiments, the sense strand is 70%, 80%, 90%, 95%, or more identical to the sense strands listed in Table 6 and Table 7. In some embodiments, the sense strand comprises at least 15 contiguous nucleotides of a sense strand sequence shown in Table 6 and Table 7. In some embodiments, the sense strand is 70%, 80%, 90%, 95%, or more identical to the sense strands listed in Table 9 and Table 10. In some embodiments, the sense strand comprises at least 15 contiguous nucleotides of a sense strand sequence shown in Table 9 and Table 10. In some embodiments, the sense strand comprises at least 15 contiguous nucleotides of a sense strand sequence shown in Table 1 and Table 2. In some embodiments, the sense strand comprises at least 16, 17, 18, 19, 20, or 21 contiguous nucleotides of a sense strand sequence shown in Table 1 and Table 2. In some embodiments, the sense strand comprises 21 contiguous nucleotides of a sense strand sequence shown in Table 1 and Table 2. In some embodiments, the sense strand sequence is selected from a sense strand sequence shown in Table 1 and Table 2. In some embodiments, the sense strand comprises at least 16, 17, 18, 19, 20, 21, 22, or 23 contiguous nucleotides of a sense strand sequence shown in Table 6 and Table 7. In some embodiments, the sense strand comprises 21 contiguous nucleotides of a sense strand sequence shown in Table 6 and Table 7. In some embodiments, the sense strand comprises 22 contiguous nucleotides of a sense strand sequence shown in Table 6 and Table 7. In some embodiments, the sense strand comprises 23 contiguous nucleotides of a sense strand sequence shown in Table 6 and Table 7. In some embodiments, the sense strand sequence is selected from a sense strand sequence shown in Table 6 and Table 7. In some embodiments, the sense strand comprises at least 16, 17, 18, 19, 20, 21, 22, or 23 contiguous nucleotides of a sense strand sequence shown in Table 9 and Table 10. In some embodiments, the sense strand comprises 21 contiguous nucleotides of a sense strand sequence shown in Table 9 and Table 10. In some embodiments, the sense strand comprises 22 contiguous nucleotides of a sense strand sequence shown in Table 9 and Table 10. In some embodiments, the sense strand comprises 23 contiguous nucleotides of a sense strand sequence shown in Table 9 and Table 10. In some embodiments, the sense strand sequence is selected from a sense strand sequence shown in Table 8 and Table 9.

[0067] In some embodiments, the antisense strand is 70%, 80%, 90%, 95%, or more identical to the antisense strands listed in Table 1 and Table 2. In some embodiments, the antisense strand comprises at least 16, 17, 18, 19, 20, or 21 contiguous nucleotides of an antisense sense strand sequence shown in Table 1 and Table 2. In some embodiments, the antisense strand comprises 21 contiguous nucleotides of an antisense sense strand sequence shown in Table 1 and Table 2. In some embodiments, the antisense strand is selected from an antisense strand sequence shown in Table 1 and Table 2. In some embodiments, the antisense strand is 70%, 80%, 90%, 95%, or more identical to the antisense strands listed in Table 6 and Table 7. In some embodiments, the antisense strand comprises at least 16, 17, 18, 19, 20, 21, 22, or 23 contiguous nucleotides of an antisense sense strand sequence shown in Table 6 and Table 7. In some embodiments, the antisense strand comprises 21 contiguous nucleotides of an antisense sense strand sequence shown Table 6 and Table 7. In some embodiments, the antisense strand comprises 22 contiguous nucleotides of an antisense sense strand sequence shown Table 6 and Table 7. In some embodiments, the antisense strand comprises 23 contiguous nucleotides of an antisense sense strand sequence shown Table 6 and Table 7. In some embodiments, the antisense strand is selected from an antisense strand sequence shown in Table 6 and Table 7. In some embodiments, the antisense strand is 70%, 80%, 90%, 95%, or more identical to the antisense strands listed in Table 9 and Table 10. In some embodiments, the antisense strand comprises at least 16, 17, 18, 19, 20, 21, 22, or 23 contiguous nucleotides of an antisense sense strand sequence shown in Table 9 and Table 10. In some embodiments, the antisense strand comprises 21 contiguous nucleotides of an antisense sense strand sequence shown Table 9 and Table 10. In some embodiments, the antisense strand comprises 22 contiguous nucleotides of an antisense sense strand sequence shown Table 9 and Table 10. In some embodiments, the antisense strand comprises 23 contiguous nucleotides of an antisense sense strand sequence shown Table 9 and Table 10. In some embodiments, the antisense strand is selected from an antisense strand sequence shown in Table 9 and Table 10.

[0068] In some embodiments, the sense strand sequence is selected from a sense strand sequence shown in Table 1 and Table 2, and the antisense strand is selected from an antisense strand sequence shown in Table 1 and Table 2. In some embodiments, the sense strand sequence is selected from a sense strand sequence shown in Table 6 and Table 7, and the antisense strand is selected from an antisense strand sequence shown in Table 6 and Table 7. In some embodiments, the sense strand sequence is selected from a sense strand sequence shown in Table 9 and Table 10, and the antisense strand is selected from an antisense strand sequence shown in Table 9 and Table 10.

[0069] In some embodiments, the dsRNA has a mismatch to a fragment of INHBE mRNA. In some embodiments, the dsRNA comprises one or two mismatches to the mRNA or fragment of human INHBE mRNA. In some embodiments, the dsRNA is more than 70% identical to the mRNA or fragment of human INHBE mRNA. In some embodiments, the dsRNA is more than 70%, 75%, 80%, 85%, 90%, or 95% identical to the mRNA or fragment of human INHBE mRNA. In some embodiments, the antisense strand comprises a nucleotide sequence that is at least about 60%, 65%, 70%, 75%, 80%, 85%, 90%, 95%, or 100% identical to a target mRNA corresponding to a fragment of INHBE mRNA. In some embodiments, the antisense strand of the dsRNA comprises at least 80% complementarity to the fragment of the INHBE mRNA. In some embodiments, the mismatch is in the sense strand. In some embodiments, the mismatch is in the antisense strand. In some embodiments, the antisense strand of the dsRNA comprises one, two, three, or four mismatches to the fragment of the INHBE mRNA. In some embodiments, the mismatch is located in the middle of the dsRNA. In some embodiments, the mismatch is in the 5′ or 3′ region of the dsRNA. In some embodiments, the mismatch is no more than 5 nucleotides from the 5′ or 3′ end of the dsRNA.

[0070] In some embodiments, at least one strand of the dsRNA comprises a 3′ or 5′ overhang of at least 1 nucleotide. In some embodiments, the overhang is at least 2 or a at least 3 nucleotides. In some embodiments, in the dsRNA at least one strand comprises a 3′ overhang. In some embodiments, in the dsRNA at least one strand comprises a 5′ overhang.

[0071] In some embodiments, the antisense strand has a 3′ end nucleotide overhang compared to the sense strand. In some embodiments, the 3′ end nucleotide overhang comprises 1, 2, or 3 nucleotides compared to the sense strand. In some embodiments, the antisense and the sense strand are at least 70%, 75%, 80%, 85%, 90%, 95%, or 100% complementary. In some embodiments, the antisense strand and the sense strand are at least 80% complementary. In some embodiments, the antisense strand and the sense strand comprise at least one, at least two, at least three, or at least four mismatched nucleotides.

[0072] The dsRNA can be synthesized by standard methods known in the art as further discussed below, e.g., by use of an automated DNA synthesizer, such as are commercially available from, for example, Biosearch, Applied Biosystems, Inc. The dsRNA includes two RNA strands that are sufficiently complementary to hybridize to form a duplex structure. One strand of the dsRNA (the antisense strand) includes a region of complementarity that is complementary to a target sequence, derived from the sequence of an mRNA formed during the expression of a INHBE gene, the other strand (the sense strand) includes a region that is complementary to the antisense strand, such that the two strands hybridize and form a duplex structure when combined under suitable conditions.

[0073] In some embodiments, the duplex structure is between 15 and 30 or between 25 and 30, or between 18 and 25, or between 19 and 24, or between 19 and 21, or 19, 20, or 21 base pairs in length. In one embodiment the duplex is 19 base pairs in length. In another embodiment the duplex is 20 base pairs in length. In another embodiment the duplex is 21 base pairs in length. When two different single stranded RNAs (ssRNA) are used in combination, the duplex lengths can be identical or can differ.

[0074] In some embodiments, each strand of the dsRNA of the disclosure is between 15 and 30, or between 18 and 25, or 18, 19, 20, 21, 22, 23, 24, or 25 nucleotides in length. In other embodiments, each is strand is about 25-30 nucleotides in length. In some embodiments, each strand of the duplex is the same length or of different lengths. When two different ssRNAs are used in combination, the lengths of each strand of each ssRNA can be identical or can differ.

[0075] In some embodiments, the dsRNA includes dsRNA that is longer than 21-23 nucleotides, e.g., dsRNA that is long enough to be processed by the RNase III enzyme Dicer into 21-23 base pair siRNA which is then incorporated into a RNA-induced silencing complex (RISC). Accordingly, a dsRNA of the disclosure is at least 25, 26, 27, 28, 29, 30, 40, 50, 60, 70, 80, 90, or at least 100 base pairs in length.

[0076] Inhibition of the expression of the INHBE gene can be assayed by, for example, a nucleic acid based assay, such as by quantitative PCR, or by a protein-based method, such as by Western blot. Expression of a INHBE gene can be reduced by at least 50% when measured by an assay as described in the Examples below. For example, expression of a INHBE gene in cell culture, such as in Huh-7 cells, can be assayed by measuring INHBE mRNA levels, such as by quantitative PCR assay, or by measuring protein levels, such as by ELISA assay.

[0077] In another aspect, the disclosure provides a single-stranded antisense oligonucleotide RNAi. An antisense oligonucleotide is a single-stranded oligonucleotide that is complementary to a sequence within the target mRNA. Antisense oligonucleotides can inhibit translation in a stoichiometric manner by base pairing to the mRNA and physically obstructing the translation machinery, see Dias, N. et al., (2002) Mol. Cancer Ther. 1:347-355. Antisense oligonucleotides can also inhibit target protein expression by binding to the mRNA target and promoting mRNA target destruction via Rnase-H. The single-stranded antisense RNA molecule can be about 13 to about 30 nucleotides in length and have a sequence that is complementary to a target sequence. For example, the single-stranded antisense RNA molecule can comprise a sequence that is at least about 13, 14, 15, 16, 17, 18, 19, 20, or more contiguous nucleotides from one of the antisense sequences in Table 1 and Table 2, Table 6 and Table 7, or Table 9 and Table 10.

### Modifications

[0078] In certain embodiments, the dsRNA is chemically modified to enhance stability of the dsRNA. The nucleic acids featured in the disclosure may be synthesized and/or modified by methods well established in the art, such as those described in “Current protocols in nucleic acid chemistry,” Beaucage, S. L. et al. (Eds.), John Wiley & Sons, Inc., New York, NY, USA, which is hereby incorporated herein by reference. Specific examples of dsRNA compounds useful in this disclosure include dsRNAs containing modified backbones or non natural internucleoside linkages. As defined in this specification, dsRNAs having modified backbones include those that retain a phosphorus atom in the backbone and those that do not have a phosphorus atom in the backbone. For the purposes of this specification, and as sometimes referenced in the art, modified dsRNAs that do not have a phosphorus atom in their internucleoside backbone can also be considered to be oligonucleosides. In some embodiments, a modified dsRNA backbone includes at least one of: a 2′-O-methyl modified nucleotide, a nucleotide comprising a 5′-phosphorothioate group, a 2′-fluoro modified nucleotide; an inverted abasic nucleotide, a thymidine-glycol nucleic acid (GNA)S-Isomer; an inosine, and inverted deoxyribonucleotide (3′-3′ linked nucleotide or 5′-5′ linked nucleotide), a thymidine-glycol nucleic acid (GNA)S-Isomer, a nucleotide comprising a modified nucleotide component represented by Formula (I):

[chemical structure]

and a nucleotide comprising a modified nucleotide component represented by Formula (II):

[chemical structure]

wherein:
[0079] each of B¹ and B² is a nucleobase; and
   [0080] R¹ is selected from the group consisting of hydrogen and C₁₋₆ alkyl;
[0081] optionally wherein the antisense strand and the sense strand each comprise at least one modified nucleotide.

[0082] In some embodiments, the nucleotide comprising a modified nucleotide component represented by Formula (I) comprises a nucleobase represented by B¹, wherein B¹ is independently selected from the group consisting of adenine, uracil, thymine, cytosine, guanine, and modified analogs thereof. In some embodiments, the nucleotide comprising a modified nucleotide component represented by Formula (II) comprises a nucleobase represented by B², wherein B² is independently selected from the group consisting of adenine, uracil, thymine, cytosine, guanine, and modified analogs thereof. In some embodiments, each of B¹ and B² is independently selected from adenine, uracil, cytosine, and modified analogs thereof. In some embodiments, R¹ is C₁₋₆ alkyl. In some embodiments, R¹ is —CH₃. In some embodiments, B¹ is uracil. In some embodiments, R¹ is —CH₃ and B¹ is uracil. In some embodiments, B² is adenine. In some embodiments, B² is uracil.

[0083] In some embodiments, the sense strand comprises an inverted deoxyribonucleotide at the 3′ end; optionally wherein the inverted deoxyribonucleotide is a 3′-3′ linked deoxythymidine. In some embodiments, the sense strand comprises an inverted deoxyribonucleotide at the 5′ end and an inverted deoxyribonucleotide at the 3′ end; optionally wherein the inverted deoxyribonucleotide at the 5′ end is a 5′-5′ linked deoxythymidine and the inverted deoxyribonucleotide at the 3′ end is a 3′-3′ linked deoxythymidine. In some embodiments, the sense strand comprises a nucleotide comprising the modified nucleotide component represented by Formula (I) at the 3′ end; optionally wherein R¹ is —CH₃ and B¹ is uracil.

[0084] In some embodiments, the modification includes one or more phosphorothioates, chiral phosphorothioates, phosphorodithioates, phosphotriesters, aminoalkylphosphotriesters, methyl and other alkyl phosphonates including 3′-alkylene phosphonates and chiral phosphonates, phosphinates, phosphoramidates including 3′-amino phosphoramidate and aminoalkylphosphoramidates, thionophosphoramidates, thionoalkylphosphonates, thionoalkylphosphotriesters, and boranophosphates having normal 3′-5′ linkages, 2′-5′ linked analogs of these) having inverted polarity wherein the adjacent pairs of nucleoside units are linked 3′-5′ to 5′-3′ or 2′-5′ to 5′-2′. Various salts, mixed salts and free acid forms are also included.

[0085] In some embodiments, the modified nucleotide includes at least one of: 5′-vinyl phosphonate nucleotide, a 5′-phosphate or phosphate mimic, a locked nucleic acid (LNA), a 2′-MOE (methoxyethyl)nucleotide, and/or a 2′-arabino fluoro (2′-araF) nucleotide. In some embodiments, the modified nucleotide antisense strand comprises a phosphate mimic at the 5′ end; optionally wherein the phosphate mimic is a 5′-E-Vinyl-phosphonate or a 4′-O-phosphonate.

[0086] In some embodiments, the modified nucleotide comprises at least one of: a 2′-deoxy-2′-fluoro modified nucleotide, a 2′-deoxy-modified nucleotide, a locked nucleotide, an abasic nucleotide, 2′-amino-modified nucleotide, 2′-alkyl-modified nucleotide, morpholino nucleotide, a phosphoramidate, and/or a non-natural base comprising nucleotide.

[0087] In some embodiments, the antisense strand and/or the sense strand comprises at least one internucleoside linkage selected from the group consisting of a phosphorothioate linkage, a phosphorodithioate linkage, a phosphotriester linkage, an alkylphosphonate linkage, an aminoalkylphosphotriester linkage, an alkylene phosphonate linkage, a phosphinate linkage, a phosphoramidate linkage, a phosphoromorpholidate linkage, a phosphoropiperazidate linkage, an aminoalkylphosphoramidate linkage, a thiophosphoramidate linkage, a thionoalkylphosphonate linkage, a thionoalkylphosphotriester linkage, a thiophosphate linkage, a selenophosphate linkage, and a boranophosphate linkage. In some embodiments, the antisense strand and/or the sense strand comprises at least one nucleotide modified linkage. In some embodiments, all the nucleotide linkages in the antisense strand are modified linkages. In some embodiments, the antisense strand and/or the sense strand comprises at least one a phosphorothioate (PS) bond.

### Conjugates

[0088] Another modification of the dsRNAs of the disclosure involves chemically linking to the dsRNA one or more ligand or targeting moieties or conjugates which enhance the activity, cellular distribution or cellular uptake of the dsRNA (e.g., a GalNAc of the present disclosure, e.g., tri-GalNAc6) Such moieties include but are not limited to lipid moieties such as a cholesterol moiety (Letsinger et al., Proc. Natl. Acid. Sci. USA, 1989, 86: 6553-6556), cholic acid (Manoharan et al., Biorg. Med. Chem. Let., 1994, 4:1053-1060), a thioether, e.g., beryl-S-tritylthiol (Manoharan et al., Ann. N.Y. Acad. Sci., 1992, 660:306-309; Manoharan et al., Biorg. Med. Chem. Let., 1993, 3:2765-2770), a thiocholesterol (Oberhauser et al., Nucl. Acids Res., 1992, 20:533-538), an aliphatic chain, e.g., dodecandiol or undecyl residues (Saison-Behmoaras et al., EMBO J, 1991, 10:1111-1118; Kabanov et al., FEBS Lett., 1990, 259:327-330; Svinarchuk et al., Biochimie, 1993, 75:49-54), a phospholipid, e.g., di-hexadecyl-rac-glycerol or triethyl-ammonium 1,2-di-O-hexadecyl-rac-glycero-3-phosphonate (Manoharan et al., Tetrahedron Lett., 1995, 36:3651-3654; Shea et al., Nucl. Acids Res., 1990, 18:3777-3783), a polyamine or a polyethylene glycol chain (Manoharan et al., Nucleosides & Nucleotides, 1995, 14:969-973), or adamantane acetic acid (Manoharan et al., Tetrahedron Lett., 1995, 36:3651-3654), a palmityl moiety (Mishra et al., Biochim. Biophys. Acta, 1995, 1264:229-237), or an octadecylamine or hexylamino-carbonyloxycholesterol moiety (Crooke et al., J. Pharmacol. Exp. Ther., 1996, 277:923-937).

[0089] In some embodiments, the ligand or targeting moiety (e.g., a GalNAc of the present disclosure, e.g., tri-GalNAc6) is conjugated to the 5′ end, 3′ end or both ends of the dsRNA. In some embodiments, the ligand or targeting moiety (e.g., a GalNAc of the present disclosure, e.g., tri-GalNAc6) is conjugated to the 3′ end of the sense strand of the dsRNA. In some embodiments, the ligand or targeting moiety (e.g., a GalNAc of the present disclosure, e.g., tri-GalNAc6) is conjugated to the 3′ end of the antisense strand of the modified dsRNA. In some embodiments, the ligand or targeting moiety (e.g., a GalNAc of the present disclosure, e.g., tri-GalNAc6) is conjugated to the 5′ end of the sense strand of the dsRNA. In some embodiments, the ligand or targeting moiety (e.g., a GalNAc of the present disclosure, e.g., tri-GalNAc6) is conjugated to the 5′ end of the antisense strand of the modified dsRNA. In some embodiments, the ligand or targeting moiety is at least one N-Acetyl-Galactosamine (GalNAc).

[0090] In some embodiments, the dsRNA may be modified by a non-ligand group. A number of non-ligand molecules have been conjugated to dsRNAs in order to enhance the activity, cellular distribution or cellular uptake of the dsRNA, and procedures for performing such conjugations are available in the scientific literature. Such non-ligand moieties include lipid moieties, such as cholesterol (Letsinger et al., Proc. Natl. Acad. Sci. USA, 1989, 86:6553), cholic acid (Manoharan et al., Bioorg. Med. Chem. Lett., 1994, 4:1053), a thioether, e.g., hexyl-S-tritylthiol (Manoharan et al., Ann. N.Y. Acad. Sci., 1992, 660:306; Manoharan et al., Bioorg. Med. Chem. Let., 1993, 3:2765), a thiocholesterol (Oberhauser et al., Nucl. Acids Res., 1992, 20:533), an aliphatic chain, e.g., dodecandiol or undecyl residues (Saison-Behmoaras et al., EMBO J., 1991, 10:111; Kabanov et al., FEBS Lett., 1990, 259:327; Svinarchuk et al., Biochimie, 1993, 75:49), a phospholipid, e.g., di-hexadecyl-rac-glycerol or triethylammonium 1,2-di-O-hexadecyl-rac-glycero-3-H-phosphonate (Manoharan et al., Tetrahedron Lett., 1995, 36:3651; Shea et al., Nucl. Acids Res., 1990, 18:3777), a polyamine or a polyethylene glycol chain (Manoharan et al., Nucleosides & Nucleotides, 1995, 14:969), or adamantane acetic acid (Manoharan et al., Tetrahedron Lett., 1995, 36:3651), a palmityl moiety (Mishra et al., Biochim. Biophys. Acta, 1995, 1264:229), or an octadecylamine or hexylamino-carbonyl-oxycholesterol moiety (Crooke et al., J. Pharmacol. Exp. Ther., 1996, 277:923). Typical conjugation protocols involve the synthesis of dsRNAs bearing an aminolinker at one or more positions of the oligonucleotide sequence. The amino group is then reacted with the molecule being conjugated using appropriate coupling or activating reagents. The conjugation reaction may be performed either with the dsRNA still bound to the solid support or following cleavage of the dsRNA in solution phase. The dsRNA conjugate can be purified for example by HPLC methods.

[0091] Conjugating a ligand to a dsRNA can enhance its cellular absorption as well as targeting to a particular tissue or uptake by specific types of cells such as liver cells. In certain instances, a hydrophobic ligand is conjugated to the dsRNA to facilitate direct permeation of the cellular membrane and or uptake across the liver cells. Alternatively, the ligand conjugated to the dsRNA is a substrate for receptor-mediated endocytosis. These approaches have been used to facilitate cell permeation of antisense oligonucleotides as well as dsRNA agents. For example, cholesterol has been conjugated to various antisense oligonucleotides resulting in compounds that are substantially more active compared to their non-conjugated analogs. See M. Manoharan Antisense & Nucleic Acid Drug Development 2002, 12, 103. Other lipophilic compounds that have been conjugated to oligonucleotides include 1-pyrene butyric acid, 1,3-bis-O-(hexadecyl)glycerol, and menthol. One example of a ligand for receptor-mediated endocytosis is folic acid. Folic acid enters the cell by folate-receptor-mediated endocytosis. dsRNA compounds bearing folic acid would be efficiently transported into the cell via the folate-receptor-mediated endocytosis. Li and coworkers report that attachment of folic acid to the 3′-terminus of an oligonucleotide resulted in an 8-fold increase in cellular uptake of the oligonucleotide. Li, S.; Deshmukh, H. M.; Huang, L. Pharm. Res. 1998, 15, 1540. Other ligands that have been conjugated to oligonucleotides include polyethylene glycols, carbohydrate clusters, cross-linking agents, porphyrin conjugates, delivery peptides and lipids such as cholesterol and cholesterylamine. Examples of carbohydrate clusters include Chol-p-(GalNAc)₃ (N-acetyl galactosamine cholesterol) and LCO(GalNAc)₃ (N-acetyl galactosamine-3′-Lithocholic-oleoyl).

### Carbohydrate Conjugates

[0092] In some embodiments, a dsRNA oligonucleotide of the disclosure further comprises a carbohydrate. The carbohydrate conjugated dsRNA is advantageous for the in vivo delivery of nucleic acids, as well as compositions suitable for in vivo therapeutic use, as described herein. As used herein, “carbohydrate” refers to a compound which is either a carbohydrate per se made up of one or more monosaccharide units having at least 6 carbon atoms (which can be linear, branched or cyclic) with an oxygen, nitrogen or sulfur atom bonded to each carbon atom; or a compound having as a part thereof a carbohydrate moiety made up of one or more monosaccharide units each having at least six carbon atoms (which can be linear, branched or cyclic), with an oxygen, nitrogen or sulfur atom bonded to each carbon atom. Representative carbohydrates include the sugars (mono-, di-, tri- and oligosaccharides containing from about 4, 5, 6, 7, 8, or 9 monosaccharide units), and polysaccharides such as starches, glycogen, cellulose and polysaccharide gums. Specific monosaccharides include C5 and above (e.g., C5, C6, C7, or C8) sugars; di- and trisaccharides include sugars having two or three monosaccharide units (e.g., C5, C6, C7, or C8).

[0093] In some embodiments, a carbohydrate conjugate for use in the compositions and methods of the disclosure is a monosaccharide. In some embodiments, the monosaccharide is an N-acetylgalactosamine, of formula I or formula II such as

[chemical structure]

[0094] In some embodiments, a carbohydrate is conjugated to the 5′ end, 3′ end or both ends of the modified dsRNA. In some embodiments, the ligand or targeting moiety is conjugated to the 3′ end of the sense strand of the modified dsRNA. In some embodiments, the ligand or targeting moiety is conjugated to the 3′ end of the antisense strand of the modified dsRNA. In some embodiments, the carbohydrate is at least one N-Acetyl-Galactosamine (GalNAc).

### III. Pharmaceutical Compositions

[0095] Also disclosed herein are pharmaceutical compositions comprising the dsRNAs targeting INHBE genes of the disclosure.

[0096] In certain embodiments, the disclosure provides pharmaceutical compositions containing a dsRNA, as described herein, and a pharmaceutically acceptable carrier. The pharmaceutical composition containing the dsRNA is useful for treating a disease or disorder associated with the expression or activity of a targeting INHBE genes, such as pathological processes mediated by targeting INHBE gene expression. Such pharmaceutical compositions are formulated based on the mode of delivery.

[0097] The pharmaceutical compositions featured herein are administered in dosages sufficient to inhibit expression of INHBE genes.

[0098] The skilled artisan will appreciate that certain factors may influence the dosage and timing required to effectively treat a subject, including but not limited to the severity of the disease or disorder, previous treatments, the general health and/or age of the subject, and other diseases present. Moreover, treatment of a subject with a therapeutically effective amount of a composition can include a single treatment or a series of treatments. Estimates of effective dosages and in vivo half-lives for the individual dsRNAs encompassed by the disclosure can be made using conventional methodologies or on the basis of in vivo testing using an appropriate animal model, as described elsewhere herein.

[0099] Advances in mouse genetics have generated a number of mouse models for the study of various human diseases, such as pathological processes mediated by INHBE expression. Such models are used for in vivo testing of dsRNA, as well as for determining a therapeutically effective dose. A suitable mouse model is, for example, a mouse containing a plasmid expressing human INHBE. Another suitable mouse model is a transgenic mouse carrying a transgene that expresses human INHBE.

[0100] The data obtained from cell culture assays and animal studies can be used in formulating a range of dosage for use in humans. The dosage of compositions featured in the disclosure lies generally within a range of circulating concentrations that include the ED50 with little or no toxicity. The dosage may vary within this range depending upon the dosage form employed and the route of administration utilized. For any compound used in the methods featured in the disclosure, the therapeutically effective dose can be estimated initially from cell culture assays. A dose may be formulated in animal models to achieve a circulating plasma concentration range of the compound or, when appropriate, of the polypeptide product of a target sequence (e.g., achieving a decreased concentration of the polypeptide) that includes the IC50 (i.e., the concentration of the test compound which achieves a half-maximal inhibition of symptoms) as determined in cell culture. Such information can be used to more accurately determine useful doses in humans. Levels in plasma may be measured, for example, by high performance liquid chromatography.

[0101] The dsRNAs featured in the disclosure can be administered in combination with other known agents effective in treatment of pathological processes mediated by INHBE gene expression. In any event, the administering physician can adjust the amount and timing of dsRNA administration on the basis of results observed using standard measures of efficacy known in the art or described herein.

### Liposomal Formulations

[0102] In certain embodiments, pharmaceutical compositions disclosed herein comprise a delivery system. Examples of delivery systems include, but are not limited to, liposomes and emulsions. Certain delivery systems are useful for preparing pharmaceutical compositions including those comprising hydrophobic compounds. In certain embodiments, certain organic solvents such as dimethylsulfoxide are used.

[0103] In some embodiments, the dsRNA of the disclosure is introduced into preformed liposomes or lipoplexes made of mixtures of cationic lipids and neutral lipids. In certain methods, dsRNA complexes with mono- or poly-cationic lipids are formed without the presence of a neutral lipid. In certain embodiments, a lipid moiety is selected to increase distribution of a pharmaceutical agent to a particular cell or tissue. In certain embodiments, a lipid moiety is selected to increase distribution of a pharmaceutical agent to fat tissue. In certain embodiments, a lipid moiety is selected to increase distribution of a pharmaceutical agent to muscle tissue.

### Excipients

[0104] In certain embodiments, the pharmaceutical composition comprises an excipient. In contrast to a carrier compound, a “pharmaceutical carrier” or “excipient” is a pharmaceutically acceptable solvent, suspending agent or any other pharmacologically inert vehicle for delivering one or more nucleic acids to an animal. The excipient may be liquid or solid and is selected, with the planned manner of administration in mind, so as to provide for the desired bulk, consistency, etc., when combined with a nucleic acid and the other components of a given pharmaceutical composition. Typical pharmaceutical carriers include, but are not limited to, binding agents (e.g., pre-gelatinized maize starch, polyvinylpyrrolidone or hydroxypropyl methylcellulose, etc.); fillers (e.g., lactose and other sugars, microcrystalline cellulose, pectin, gelatin, calcium sulfate, ethyl cellulose, polyacrylates or calcium hydrogen phosphate, etc.); lubricants (e.g., magnesium stearate, talc, silica, colloidal silicon dioxide, stearic acid, metallic stearates, hydrogenated vegetable oils, corn starch, polyethylene glycols, sodium benzoate, sodium acetate, etc.); disintegrants (e.g., starch, sodium starch glycolate, etc.); and wetting agents (e.g., sodium lauryl sulphate, etc.).

[0105] Pharmaceutically acceptable organic or inorganic excipients suitable for non-parenteral administration which do not deleteriously react with nucleic acids can also be used to formulate the compositions of the present disclosure. Suitable pharmaceutically acceptable carriers include, but are not limited to, water, salt solutions, alcohols, polyethylene glycols, gelatin, lactose, amylose, magnesium stearate, talc, silicic acid, viscous paraffin, hydroxymethylcellulose, polyvinylpyrrolidone and the like.

[0106] Formulations for topical administration of nucleic acids may include sterile and non-sterile aqueous solutions, non-aqueous solutions in common solvents such as alcohols, or solutions of the nucleic acids in liquid or solid oil bases. The solutions may also contain buffers, diluents and other suitable additives. Pharmaceutically acceptable organic or inorganic excipients suitable for non-parenteral administration which do not deleteriously react with nucleic acids can be used.

[0107] Suitable pharmaceutically acceptable excipients include, but are not limited to, water, salt solutions, alcohol, polyethylene glycols, gelatin, lactose, amylose, magnesium stearate, talc, silicic acid, viscous paraffin, hydroxymethylcellulose, polyvinylpyrrolidone and the like.

### Other Components

[0108] The compositions of the present disclosure may additionally contain other adjunct components conventionally found in pharmaceutical compositions, at their art-established usage levels. Thus, for example, the compositions may contain additional, compatible, pharmaceutically-active materials such as, for example, antipruritics, astringents, local anesthetics or anti-inflammatory agents, or may contain additional materials useful in physically formulating various dosage forms of the compositions of the present disclosure, such as dyes, flavoring agents, preservatives, antioxidants, opacifiers, thickening agents and stabilizers. However, such materials, when added, should not unduly interfere with the biological activities of the components of the compositions of the present disclosure. The formulations can be sterilized and, if desired, mixed with auxiliary agents, e.g., lubricants, preservatives, stabilizers, wetting agents, emulsifiers, salts for influencing osmotic pressure, buffers, colorings, flavorings and/or aromatic substances and the like which do not deleteriously interact with the nucleic acid(s) of the formulation.

[0109] Aqueous suspensions may contain substances which increase the viscosity of the suspension including, for example, sodium carboxymethylcellulose, sorbitol and/or dextran. The suspension may also contain stabilizers.

### Administration

[0110] Also disclosed herein are methods of administration for the pharmaceutical compositions and formulations which include the dsRNA compositions and pharmaceutical compositions of the disclosure. In some embodiments, the dsRNA composition or pharmaceutical composition of the disclosure is administered in a number of ways depending upon whether local or systemic treatment is desired and upon the area to be treated.

[0111] In certain embodiments, administration of the pharmaceutical composition is topical (including buccal and sublingual), pulmonary, e.g., by inhalation or insufflation of powders or aerosols, including by nebulizer; intratracheal, intranasal, epidermal and transdermal, oral or parenteral. In some embodiments, parenteral administration includes intravenous, intraarterial, subcutaneous, intraperitoneal or intramuscular injection or infusion; or intracranial, e.g., intraparenchymal, intrathecal or intraventricular, administration.

[0112] Pharmaceutical compositions containing a dsRNA of the disclosure, can be presented in a dosage unit form and can be prepared by any suitable method. A pharmaceutical composition should be formulated to be compatible with its intended route of administration. Useful formulations can be prepared by methods well known in the pharmaceutical art. For example, see Remington's Pharmaceutical Sciences, 18th ed. (Mack Publishing Company, 1990).

[0113] Pharmaceutical formulations, for example, are sterile. Sterilization can be accomplished, for example, by filtration through sterile filtration membranes. Where the composition is lyophilized, filter sterilization can be conducted prior to or following lyophilization and reconstitution.

[0114] In certain embodiments, the dsRNA is delivered in a manner to target a particular tissue, for example the liver.

[0115] The amount of active ingredient which can be combined with a carrier material to produce a single dosage form will vary depending upon the host being treated, the particular mode of administration. The amount of active ingredient which can be combined with a carrier material to produce a single dosage form will generally be that amount of the compound (e.g., dsRNA molecule) which produces a therapeutic effect.

[0116] In certain embodiments, a formulation of the present disclosure comprises an excipient selected from the group consisting of cyclodextrins, celluloses, liposomes, micelle forming agents, e.g., bile acids, and polymeric carriers, e.g., polyesters and polyanhydrides; and a compound (e.g., dsRNA molecule) of the present disclosure. In certain embodiments, an aforementioned formulation renders orally bioavailable a compound (e.g., dsRNA molecule) of the present disclosure.

[0117] Formulations of the disclosure suitable for oral administration may be in the form of capsules, cachets, pills, tablets, lozenges (using a flavored basis, usually sucrose and acacia or tragacanth), powders, granules, or as a solution or a suspension in an aqueous or non-aqueous liquid, or as an oil-in-water or water-in-oil liquid emulsion, or as an elixir or syrup, or as pastilles (using an inert base, such as gelatin and glycerin, or sucrose and acacia) and/or as mouth washes and the like, each containing a predetermined amount of a compound (e.g., dsRNA molecule) of the present disclosure as an active ingredient. A compound (e.g., dsRNA molecule) of the present disclosure may also be administered as a bolus, electuary or paste.

[0118] Liquid dosage forms for oral administration of the compounds (e.g., dsRNA molecules) of the disclosure include pharmaceutically acceptable emulsions, microemulsions, solutions, suspensions, syrups and elixirs.

### IV. Methods for Inhibiting Expression of an INHBE Gene

[0119] In one aspect, the disclosure provides a method for inhibiting the expression of an INHBE gene in a cell. The method comprises administering a dsRNA targeting an INHBE gene to a cell, such that expression of the target INHBE gene in the cell is reduced. The disclosure includes methods performed in cells in in vitro or in vivo. In some embodiments, the method is performed in the cell of an animal, e.g., a mouse, a rat, a non-human primate, or a human.

[0120] The present disclosure also provides methods of using a dsRNA of the disclosure and/or a composition containing an dsRNA of the present disclosure to reduce and/or inhibit INHBE expression in a cell. The methods include contacting the cell with a dsRNA of the disclosure and maintaining the cell for a time sufficient to obtain degradation of the mRNA transcript of a INHBE gene, thereby inhibiting expression of the INHBE gene in the cell. Reduction in gene expression can be assessed by any methods known in the art. For example, a reduction in the expression of INHBE may be determined by determining the mRNA expression level of INHBE using methods routine to one of ordinary skill in the art, e.g., Northern blotting, qRT-PCR, by determining the protein level of INHBE using methods routine to one of ordinary skill in the art, such as Western blotting, immunological techniques, and/or by determining a biological activity of INHBE, such as affecting one or more molecules associated with the cellular blood clotting mechanism (or in an in vivo setting, blood clotting itself).

[0121] In the methods of the disclosure the cell may be contacted in vitro or in vivo, i.e., the cell may be within a subject.

[0122] A cell suitable for treatment using the methods of the disclosure may be any cell that expresses a INHBE gene. A cell suitable for use in the methods of the disclosure may be a mammalian cell, e.g., a primate cell (such as a human cell or a non-human primate cell, e.g., a monkey cell or a chimpanzee cell), a non-primate cell (such as a cow cell, a pig cell, a camel cell, a llama cell, a horse cell, a goat cell, a rabbit cell, a sheep cell, a hamster, a guinea pig cell, a cat cell, a dog cell, a rat cell, a mouse cell, a lion cell, a tiger cell, a bear cell, or a buffalo cell), a bird cell (e.g., a duck cell or a goose cell), or a whale cell. In one embodiment, the cell is a human cell, e.g., a human liver cell.

[0123] In some embodiments, the INHBE expression is inhibited by at least 30% relative to a control after administration of the dsRNA oligonucleotide of the disclosure.

[0124] In some embodiments, a method of treating a disorder mediated by INHBE is provided, comprising administering to a subject in need of such treatment a therapeutically effective amount of an dsRNA oligonucleotide or a pharmaceutical composition of the disclosure.

[0125] In some embodiments, the disorder is a cardiovascular disorder. In some embodiments, the disorder is cardiovascular disease.

### EXAMPLES

[0126] The following examples are given for the purpose of illustrating various embodiments of the disclosure and are not meant to limit the present disclosure in any fashion. The present examples, along with the methods described herein are presently representative of preferred embodiments, are exemplary, and are not intended as limitations on the scope of the disclosure. Changes therein and other uses which are encompassed within the spirit of the disclosure as defined by the scope of the claims will occur to those skilled in the art.

### Example 1. In Vitro RNA Interference (RNAi) Screen in Huh-7 Cell Line

[0127] This example describes a screen for siRNA-based inhibition of the INHBE gene in a hepatocyte derived cellular carcinoma cell model (Huh-7). Briefly, Huh-7 cells were transfected were transfected with 147 3′-GalNAc conjugated, modified siRNAs (Duplexes 100488-100634, SEQ ID NOs: 294-440, sense strand; and SEQ ID NOs: 441-587, antisense strand) at 10 nM and 0.1 nM. Sequences of exemplary, unmodified and modified siRNA compounds are shown in Table 1 and Table 2, respectively. Compounds in Table 2 were 3′ GalNac modified. INHBE mRNA level was measured by quantitative PCR and normalized to GAPDH relative to mock treated control cells. Table 3 and FIGS. 1A, B and C show the results of single dose screens at 10 nM and 0.1 nM in Huh7 cells using the selected INHBE siRNAs. The data are presented as percent inhibition of INHBE mRNA in the cells transfected with siRNAs relative to INHBE mRNA in the mock treated control cells.

TABLE 1
[]INHBE siRNA unmodified sequences

| | | | | Position in |
|---|---|---|---|---|
| | SEQ | | SEQ | NM 031479.5 |
| | ID | | ID | (SEQ ID NO: |
| Sense 5′-3′ | NO: | Antisense 5′-3′ | NO: | 588) |
| GGGUCAAGCACAGCUAUCCA | 1 | AUGGAUAGCUGUGCUUGACCCU | 147 | 23 |
| U | | C | | |
| CACAGCUAUCCAUCAGAUGA | 2 | AUCAUCUGAUGGAUAGCUGUGC | 148 | 31 |
| U | | U | | |
| CAGCUAUCCAUCAGAUGAUC | 3 | AGAUCAUCUGAUGGAUAGCUGU | 149 | 33 |
| U | | G | | |
| AGCUAUCCAUCAGAUGAUCU | 4 | UAGAUCAUCUGAUGGAUAGCUG | 150 | 34 |
| A | | U | | |
| CUAUCCAUCAGAUGAUCUAC | 5 | AGUAGAUCAUCUGAUGGAUAGC | 151 | 36 |
| U | | U | | |
| UAUCCAUCAGAUGAUCUACU | 6 | AAGUAGAUCAUCUGAUGGAUAG | 152 | 37 |
| U | | C | | |
| CCAUCAGAUGAUCUACUUUC | 7 | UGAAAGUAGAUCAUCUGAUGGA | 153 | 40 |
| A | | U | | |
| CUACUUUCAGCCUUCCUGAG | 8 | ACUCAGGAAGGCUGAAAGUAGA | 154 | 52 |
| U | | U | | |
| GACAAUAGAAGACAGGUGGC | 9 | AGCCACCUGUCUUCUAUUGUCU | 155 | 77 |
| U | | G | | |
| GCAGUGGUGUCUGCUGUCAC | 10 | AGUGACAGCAGACACCACUGCC | 156 | 123 |
| U | | A | | |
| CUCAUUGGCCCCCAGCAAUC | 11 | UGAUUGCUGGGGGCCAAUGAGG | 157 | 149 |
| A | | G | | |
| CUCCUGUGGGGGCUCCAAAC | 12 | AGUUUGGAGCCCCCACAGGAGG | 158 | 311 |
| U | | G | | |
| CUGGAGCUAGCCAAGCAGCA | 13 | UUGCUGCUUGGCUAGCUCCAGC | 159 | 360 |
| A | | A | | |
| UGGAGCUAGCCAAGCAGCAA | 14 | UUUGCUGCUUGGCUAGCUCCAG | 160 | 361 |
| A | | C | | |
| GGAGCUAGCCAAGCAGCAAA | 15 | AUUUGCUGCUUGGCUAGCUCCA | 161 | 362 |
| U | | G | | |
| GAGCUAGCCAAGCAGCAAAU | 16 | GAUUUGCUGCUUGGCUAGCUCC | 162 | 363 |
| C | | A | | |
| AGCUAGCCAAGCAGCAAAUC | 17 | GGAUUUGCUGCUUGGCUAGCUC | 163 | 364 |
| C | | C | | |
| GCUAGCCAAGCAGCAAAUCC | 18 | AGGAUUUGCUGCUUGGCUAGCU | 164 | 365 |
| U | | C | | |
| UAGCCAAGCAGCAAAUCCUG | 19 | CCAGGAUUUGCUGCUUGGCUAG | 165 | 367 |
| G | | C | | |
| GCCAAGCAGCAAAUCCUGGA | 20 | AUCCAGGAUUUGCUGCUUGGCU | 166 | 369 |
| U | | A | | |
| UGACCAGUCGUCCCAGAAUA | 21 | UUAUUCUGGGACGACUGGUCAG | 167 | 400 |
| A | | G | | |
| ACCAGUCGUCCCAGAAUAAC | 22 | AGUUAUUCUGGGACGACUGGUC | 168 | 402 |
| U | | A | | |
| CGUCCCAGAAUAACUCAUCC | 23 | AGGAUGAGUUAUUCUGGGACGA | 169 | 408 |
| U | | C | | |
| CGCUGACCAGAGCCCUCCGG | 24 | UCCGGAGGGCUCUGGUCAGCGC | 170 | 442 |
| A | | U | | |
| GCUGACCAGAGCCCUCCGGA | 25 | CUCCGGAGGGCUCUGGUCAGCG | 171 | 443 |
| G | | C | | |
| CUGACCAGAGCCCUCCGGAG | 26 | UCUCCGGAGGGCUCUGGUCAGC | 172 | 444 |
| A | | G | | |
| UGACCAGAGCCCUCCGGAGA | 27 | GUCUCCGGAGGGCUCUGGUCAG | 173 | 445 |
| C | | C | | |
| GACCAGAGCCCUCCGGAGAC | 28 | AGUCUCCGGAGGGCUCUGGUCA | 174 | 446 |
| U | | G | | |
| ACCAGAGCCCUCCGGAGACU | 29 | UAGUCUCCGGAGGGCUCUGGUC | 175 | 447 |
| A | | A | | |
| AGGGAAUGGGGAGGAGGUCA | 30 | AUGACCUCCUCCCCAUUCCCUG | 176 | 488 |
| U | | G | | |
| AGGAGGUCAUCAGCUUUGCU | 31 | UAGCAAAGCUGAUGACCUCCUC | 177 | 499 |
| A | | C | | |
| GAGGUCAUCAGCUUUGCUAC | 32 | AGUAGCAAAGCUGAUGACCUCC | 178 | 501 |
| U | | U | | |
| GCUUUGCUACUGUCACAGAC | 33 | AGUCUGUGACAGUAGCAAAGCU | 179 | 511 |
| U | | G | | |
| CGGUCCCACCACCUGUACCA | 34 | AUGGUACAGGUGGUGGGACCGA | 180 | 579 |
| U | | G | | |
| GGUCCCACCACCUGUACCAU | 35 | CAUGGUACAGGUGGUGGGACCG | 181 | 580 |
| G | | A | | |
| GUCCCACCACCUGUACCAUG | 36 | GCAUGGUACAGGUGGUGGGACC | 182 | 581 |
| C | | G | | |
| UCCCACCACCUGUACCAUGC | 37 | GGCAUGGUACAGGUGGUGGGAC | 183 | 582 |
| C | | C | | |
| CCCACCACCUGUACCAUGCC | 38 | GGGCAUGGUACAGGUGGUGGGA | 184 | 583 |
| C | | C | | |
| CCACCACCUGUACCAUGCCC | 39 | CGGGCAUGGUACAGGUGGUGGG | 185 | 584 |
| G | | A | | |
| CACCACCUGUACCAUGCCCG | 40 | GCGGGCAUGGUACAGGUGGUGG | 186 | 585 |
| C | | G | | |
| ACCACCUGUACCAUGCCCGC | 41 | GGCGGGCAUGGUACAGGUGGUG | 187 | 586 |
| C | | G | | |
| CCACCUGUACCAUGCCCGCC | 42 | AGGCGGGCAUGGUACAGGUGGU | 188 | 587 |
| U | | G | | |
| CACCUGUACCAUGCCCGCCU | 43 | CAGGCGGGCAUGGUACAGGUGG | 189 | 588 |
| G | | U | | |
| CCACCCUUCCUGGCACUCUU | 44 | AAAGAGUGCCAGGAAGGGUGGG | 190 | 625 |
| U | | G | | |
| CCCUUCCUGGCACUCUUUGC | 45 | AGCAAAGAGUGCCAGGAAGGGU | 191 | 628 |
| U | | G | | |
| UGGCACUCUUUGCUUGAGGA | 46 | AUCCUCAAGCAAAGAGUGCCAG | 192 | 635 |
| U | | G | | |
| GCACUCUUUGCUUGAGGAUC | 47 | AGAUCCUCAAGCAAAGAGUGCC | 193 | 637 |
| U | | A | | |
| CACUCUUUGCUUGAGGAUCU | 48 | AAGAUCCUCAAGCAAAGAGUGC | 194 | 638 |
| U | | C | | |
| CUAGUGGCUUGAGGGGUGAG | 49 | UCUCACCCCUCAAGCCACUAGA | 195 | 754 |
| A | | G | | |
| GGCUUGAGGGGUGAGAAGUC | 50 | AGACUUCUCACCCCUCAAGCCA | 196 | 759 |
| U | | C | | |
| GAAGUCUGGUGUCCUGAAAC | 51 | AGUUUCAGGACACCAGACUUCU | 197 | 773 |
| U | | C | | |
| UGGUGUCCUGAAACUGCAAC | 52 | AGUUGCAGUUUCAGGACACCAG | 198 | 779 |
| U | | A | | |
| GGUGUCCUGAAACUGCAACU | 53 | UAGUUGCAGUUUCAGGACACCA | 199 | 780 |
| A | | G | | |
| CAGCCCUUCCUAGAGCUUAA | 54 | CUUAAGCUCUAGGAAGGGCUGC | 200 | 876 |
| G | | U | | |
| GCCCUUCCUAGAGCUUAAGA | 55 | AUCUUAAGCUCUAGGAAGGGCU | 201 | 878 |
| U | | G | | |
| GAGCUUAAGAUCCGAGCCAA | 56 | AUUGGCUCGGAUCUUAAGCUCU | 202 | 888 |
| U | | A | | |
| CCAUUACGUAGACUUCCAGG | 57 | UCCUGGAAGUCUACGUAAUGGU | 203 | 983 |
| A | | C | | |
| CCCGAGGGGUACCAGCUGAA | 58 | AUUCAGCUGGUACCCCUCGGGC | 204 | 1032 |
| U | | U | | |
| CGAGGGGUACCAGCUGAAUU | 59 | UAAUUCAGCUGGUACCCCUCGG | 205 | 1034 |
| A | | G | | |
| GGUACCAGCUGAAUUACUGC | 60 | UGCAGUAAUUCAGCUGGUACCC | 206 | 1039 |
| A | | C | | |
| GUACCAGCUGAAUUACUGCA | 61 | CUGCAGUAAUUCAGCUGGUACC | 207 | 1040 |
| G | | C | | |
| UACCAGCUGAAUUACUGCAG | 62 | ACUGCAGUAAUUCAGCUGGUAC | 208 | 1041 |
| U | | C | | |
| ACCAGCUGAAUUACUGCAGU | 63 | CACUGCAGUAAUUCAGCUGGUA | 209 | 1042 |
| G | | C | | |
| CCAGCUGAAUUACUGCAGUG | 64 | CCACUGCAGUAAUUCAGCUGGU | 210 | 1043 |
| G | | A | | |
| AGCUGAAUUACUGCAGUGGG | 65 | GCCCACUGCAGUAAUUCAGCUG | 211 | 1045 |
| C | | G | | |
| GCUGAAUUACUGCAGUGGGC | 66 | UGCCCACUGCAGUAAUUCAGCU | 212 | 1046 |
| A | | G | | |
| CUGAAUUACUGCAGUGGGCA | 67 | CUGCCCACUGCAGUAAUUCAGC | 213 | 1047 |
| G | | U | | |
| AUUACUGCAGUGGGCAGUGC | 68 | GGCACUGCCCACUGCAGUAAUU | 214 | 1051 |
| C | | C | | |
| GGCAUUGCUGCCUCUUUCCA | 69 | AUGGAAAGAGGCAGCAAUGCCU | 215 | 1095 |
| U | | G | | |
| GCAUUGCUGCCUCUUUCCAU | 70 | AAUGGAAAGAGGCAGCAAUGCC | 216 | 1096 |
| U | | U | | |
| CUCUUUCCAUUCUGCCGUCU | 71 | AAGACGGCAGAAUGGAAAGAGG | 217 | 1106 |
| U | | C | | |
| UCAGCCUCCUCAAAGCCAAC | 72 | UGUUGGCUUUGAGGAGGCUGAA | 218 | 1126 |
| A | | G | | |
| CAGCCUCCUCAAAGCCAACA | 73 | UUGUUGGCUUUGAGGAGGCUGA | 219 | 1127 |
| A | | A | | |
| UCCUCAAAGCCAACAAUCCU | 74 | AAGGAUUGUUGGCUUUGAGGAG | 220 | 1132 |
| U | | G | | |
| UCUCUCCUCUACCUGGAUCA | 75 | AUGAUCCAGGUAGAGGAGAGAG | 221 | 1200 |
| U | | A | | |
| UCUCCUCUACCUGGAUCAUA | 76 | UUAUGAUCCAGGUAGAGGAGAG | 222 | 1202 |
| A | | A | | |
| CUCCUCUACCUGGAUCAUAA | 77 | AUUAUGAUCCAGGUAGAGGAGA | 223 | 1203 |
| U | | G | | |
| UACCUGGAUCAUAAUGGCAA | 78 | AUUGCCAUUAUGAUCCAGGUAG | 224 | 1209 |
| U | | A | | |
| CCUGGAUCAUAAUGGCAAUG | 79 | ACAUUGCCAUUAUGAUCCAGGU | 225 | 1211 |
| U | | A | | |
| AUCAUAAUGGCAAUGUGGUC | 80 | UGACCACAUUGCCAUUAUGAUC | 226 | 1216 |
| A | | C | | |
| UCAUAAUGGCAAUGUGGUCA | 81 | UUGACCACAUUGCCAUUAUGAU | 227 | 1217 |
| A | | C | | |
| CAUAAUGGCAAUGUGGUCAA | 82 | CUUGACCACAUUGCCAUUAUGA | 228 | 1218 |
| G | | U | | |
| AUAAUGGCAAUGUGGUCAAG | 83 | UCUUGACCACAUUGCCAUUAUG | 229 | 1219 |
| A | | A | | |
| UAAUGGCAAUGUGGUCAAGA | 84 | GUCUUGACCACAUUGCCAUUAU | 230 | 1220 |
| C | | G | | |
| AAUGGCAAUGUGGUCAAGAC | 85 | CGUCUUGACCACAUUGCCAUUA | 231 | 1221 |
| G | | U | | |
| CAAUGUGGUCAAGACGGAUG | 86 | ACAUCCGUCUUGACCACAUUGC | 232 | 1226 |
| U | | C | | |
| CAAGACGGAUGUGCCAGAUA | 87 | AUAUCUGGCACAUCCGUCUUGA | 233 | 1235 |
| U | | C | | |
| GAGGCCUGUGGCUGCAGCUA | 88 | CUAGCUGCAGCCACAGGCCUCC | 234 | 1263 |
| G | | A | | |
| AGGCCUGUGGCUGCAGCUAG | 89 | GCUAGCUGCAGCCACAGGCCUC | 235 | 1264 |
| C | | C | | |
| GGCCUGUGGCUGCAGCUAGC | 90 | UGCUAGCUGCAGCCACAGGCCU | 236 | 1265 |
| A | | C | | |
| GCCUGUGGCUGCAGCUAGCA | 91 | UUGCUAGCUGCAGCCACAGGCC | 237 | 1266 |
| A | | U | | |
| CCUGUGGCUGCAGCUAGCAA | 92 | CUUGCUAGCUGCAGCCACAGGC | 238 | 1267 |
| G | | C | | |
| GCUUUGGAGUGAAGAGACCA | 93 | UUGGUCUCUUCACUCCAAAGCC | 239 | 1298 |
| A | | C | | |
| CAACCACCUGGCAAUAUGAC | 94 | AGUCAUAUUGCCAGGUGGUUGU | 240 | 1389 |
| U | | U | | |
| ACCACCUGGCAAUAUGACUC | 95 | UGAGUCAUAUUGCCAGGUGGUU | 241 | 1391 |
| A | | G | | |
| CACCUGGCAAUAUGACUCAC | 96 | AGUGAGUCAUAUUGCCAGGUGG | 242 | 1393 |
| U | | U | | |
| GGACCCAAAUGGGCACUUUC | 97 | AGAAAGUGCCCAUUUGGGUCCC | 243 | 1425 |
| U | | A | | |
| CCCAAAUGGGCACUUUCUUG | 98 | ACAAGAAAGUGCCCAUUUGGGU | 244 | 1428 |
| U | | C | | |
| CAAAUGGGCACUUUCUUGUC | 99 | AGACAAGAAAGUGCCCAUUUGG | 245 | 1430 |
| U | | G | | |
| GGCACUUUCUUGUCUGAGAC | 100 | AGUCUCAGACAAGAAAGUGCCC | 246 | 1436 |
| U | | A | | |
| CACUUUCUUGUCUGAGACUC | 101 | AGAGUCUCAGACAAGAAAGUGC | 247 | 1438 |
| U | | C | | |
| CUUGUCUGAGACUCUGGCUU | 102 | UAAGCCAGAGUCUCAGACAAGA | 248 | 1444 |
| A | | A | | |
| AGGGAAGGCAGAGAAAAAUU | 103 | UAAUUUUUCUCUGCCUUCCCUC | 249 | 1586 |
| A | | C | | |
| GGGAAGGCAGAGAAAAAUUA | 104 | GUAAUUUUUCUCUGCCUUCCCU | 250 | 1587 |
| C | | C | | |
| AGCCUCUCCCAAGAUGAGAA | 105 | UUUCUCAUCUUGGGAGAGGCUA | 251 | 1610 |
| A | | A | | |
| CCUCUCCCAAGAUGAGAAAG | 106 | ACUUUCUCAUCUUGGGAGAGGC | 252 | 1612 |
| U | | U | | |
| CUCCCAAGAUGAGAAAGUCC | 107 | AGGACUUUCUCAUCUUGGGAGA | 253 | 1615 |
| U | | G | | |
| GGGGAGGAGGAAGCAGAUAG | 108 | UCUAUCUGCUUCCUCCUCCCCU | 254 | 1643 |
| A | | C | | |
| GGGAGGAGGAAGCAGAUAGA | 109 | AUCUAUCUGCUUCCUCCUCCCC | 255 | 1644 |
| U | | U | | |
| CAGAAACAGGAGUCAGGAAA | 110 | UUUUCCUGACUCCUGUUUCUGG | 256 | 1786 |
| A | | G | | |
| GCACUAAGCCUAAGAAGUUC | 111 | GGAACUUCUUAGGCUUAGUGCC | 257 | 1811 |
| C | | U | | |
| CCCACUGGGAGACAAGCAUU | 112 | AAAUGCUUGUCUCCCAGUGGGU | 258 | 1855 |
| U | | C | | |
| CCACUGGGAGACAAGCAUUU | 113 | UAAAUGCUUGUCUCCCAGUGGG | 259 | 1856 |
| A | | U | | |
| ACUGGGAGACAAGCAUUUAU | 114 | UAUAAAUGCUUGUCUCCCAGUG | 260 | 1858 |
| A | | G | | |
| UGGGAGACAAGCAUUUAUAC | 115 | AGUAUAAAUGCUUGUCUCCCAG | 261 | 1860 |
| U | | U | | |
| GGGAGACAAGCAUUUAUACU | 116 | AAGUAUAAAUGCUUGUCUCCCA | 262 | 1861 |
| U | | G | | |
| GACAAGCAUUUAUACUUUCU | 117 | AAGAAAGUAUAAAUGCUUGUCU | 263 | 1865 |
| U | | C | | |
| GAGCCACCGCGCCUGGCUUA | 118 | AUAAGCCAGGCGCGGUGGCUCA | 264 | 2153 |
| U | | C | | |
| CCACCGCGCCUGGCUUAUAC | 119 | AGUAUAAGCCAGGCGCGGUGGC | 265 | 2156 |
| U | | U | | |
| ACCGCGCCUGGCUUAUACUU | 120 | AAAGUAUAAGCCAGGCGCGGUG | 266 | 2158 |
| U | | G | | |
| CGCGCCUGGCUUAUACUUUC | 121 | AGAAAGUAUAAGCCAGGCGCGG | 267 | 2160 |
| U | | U | | |
| GCGCCUGGCUUAUACUUUCU | 122 | AAGAAAGUAUAAGCCAGGCGCG | 268 | 2161 |
| U | | G | | |
| CGCCUGGCUUAUACUUUCUU | 123 | UAAGAAAGUAUAAGCCAGGCGC | 269 | 2162 |
| A | | G | | |
| GCCUGGCUUAUACUUUCUUA | 124 | UUAAGAAAGUAUAAGCCAGGCG | 270 | 2163 |
| A | | C | | |
| CCUGGCUUAUACUUUCUUAA | 125 | AUUAAGAAAGUAUAAGCCAGGC | 271 | 2164 |
| U | | G | | |
| UGGCUUAUACUUUCUUAAUA | 126 | UUAUUAAGAAAGUAUAAGCCAG | 272 | 2166 |
| A | | G | | |
| GGCUUAUACUUUCUUAAUAA | 127 | UUUAUUAAGAAAGUAUAAGCCA | 273 | 2167 |
| A | | G | | |
| CUUAUACUUUCUUAAUAAAA | 128 | UUUUUAUUAAGAAAGUAUAAGC | 274 | 2169 |
| A | | C | | |
| AGGGGUGUCCACAAAGUCAA | 129 | UUUGACUUUGUGGACACCCCUG | 275 | 2296 |
| A | | A | | |
| GGGGUGUCCACAAAGUCAAA | 130 | CUUUGACUUUGUGGACACCCCU | 276 | 2297 |
| G | | G | | |
| UCAUAAUAAUACUAACAUGU | 131 | AACAUGUUAGUAUUAUUAUGAA | 277 | 2324 |
| U | | A | | |
| ACUAACAUGUUAUUUGCCUU | 132 | AAAGGCAAAUAACAUGUUAGUA | 278 | 2334 |
| U | | U | | |
| GUUAUUUGCCUUUUGAAUUC | 133 | AGAAUUCAAAAGGCAAAUAACA | 279 | 2342 |
| U | | U | | |
| UGCCUUUUGAAUUCUCAUUA | 134 | AUAAUGAGAAUUCAAAAGGCAA | 280 | 2348 |
| U | | A | | |
| GCCUUUUGAAUUCUCAUUAU | 135 | GAUAAUGAGAAUUCAAAAGGCA | 281 | 2349 |
| C | | A | | |
| CCUUUUGAAUUCUCAUUAUC | 136 | AGAUAAUGAGAAUUCAAAAGGC | 282 | 2350 |
| U | | A | | |
| CUUUUGAAUUCUCAUUAUCU | 137 | AAGAUAAUGAGAAUUCAAAAGG | 283 | 2351 |
| U | | C | | |
| UGAAUUCUCAUUAUCUUAAA | 138 | UUUUAAGAUAAUGAGAAUUCAA | 284 | 2355 |
| A | | A | | |
| GAAUUCUCAUUAUCUUAAAA | 139 | AUUUUAAGAUAAUGAGAAUUCA | 285 | 2356 |
| U | | A | | |
| CCGUGUGACAUGUGAUUACA | 140 | AUGUAAUCACAUGUCACACGGC | 286 | 2400 |
| U | | C | | |
| UGUGACAUGUGAUUACAUCA | 141 | AUGAUGUAAUCACAUGUCACAC | 287 | 2403 |
| U | | G | | |
| UGACAUGUGAUUACAUCAUC | 142 | AGAUGAUGUAAUCACAUGUCAC | 288 | 2405 |
| U | | A | | |
| GACAUGUGAUUACAUCAUCU | 143 | AAGAUGAUGUAAUCACAUGUCA | 289 | 2406 |
| U | | C | | |
| UCUUUCUGACAUCAUUGUUA | 144 | UUAACAAUGAUGUCAGAAAGAU | 290 | 2423 |
| A | | G | | |
| CUUUCUGACAUCAUUGUUAA | 145 | AUUAACAAUGAUGUCAGAAAGA | 291 | 2424 |
| U | | U | | |
| GACAUCAUUGUUAAUGGAAU | 146 | CAUUCCAUUAACAAUGAUGUCA | 292 | 2430 |
| G | | G | | |
| GUUAAUGGAAUGUGUGCUUG | 147 | ACAAGCACACAUUCCAUUAACA | 293 | 2439 |
| U | | A | | |

TABLE 2
[]GalNac modified sense strand and antisense strand sequences conjugated to
3′-GalNAc targeting INHBE mRNA.

| | | SEQ | | SEQ |
|---|---|---|---|---|
| Duplex | | ID | | ID |
| name | Sense 5′-3′ (modified) | NO: | Antisense 5′-3′ (modified) | NO: |
| 100488 | g*g*gucaAgCACagcuauccau | 294 | a*U*ggaUaGCugugCuUgaccc*u*c | 441 |
| 100489 | c*a*cagcUaUCCaucagaugau | 295 | a*U*cauCuGAuggaUaGcugug*c*u | 442 |
| 100490 | c*a*gcuaUcCAUcagaugaucu | 296 | a*G*aucAuCUgaugGaUagcug*u*g | 443 |
| 100491 | a*g*cuauCcAUCagaugaucua | 297 | u*A*gauCaUCugauGgAuagcu*g*u | 444 |
| 100492 | c*u*auccAuCAGaugaucuacu | 298 | a*G*uagAuCAucugAuGgauag*c*u | 445 |
| 100493 | u*a*uccaUcAGAugaucuacuu | 299 | a*A*guaGaUCaucuGaUggaua*g*c | 446 |
| 100494 | c*c*aucaGaUGAucuacuuuca | 300 | u*G*aaaGuAGaucaUcUgaugg*a*u | 447 |
| 100495 | c*u*acuuUcAGCcuuccugagu | 301 | a*C*ucaGgAAggcuGaAaguag*a*u | 448 |
| 100496 | g*a*caauAgAAGacagguggcu | 302 | a*G*ccaCcUGucuuCuAuuguc*u*g | 449 |
| 100497 | g*c*agugGuGUCugcugucacu | 303 | a*G*ugaCaGCagacAcCacugc*c*a | 450 |
| 100498 | c*u*cauuGgCCCccagcaauca | 304 | u*G*auuGcUGggggCcAaugag*g*g | 451 |
| 100499 | c*u*ccugUgGGGgcuccaaacu | 305 | a*G*uuuGgAGccccCaCaggag*g*g | 452 |
| 100500 | c*u*ggagCuAGCcaagcagcaa | 306 | u*U*gcuGcUUggcuAgCuccag*c*a | 453 |
| 100501 | u*g*gagcUaGCCaagcagcaaa | 307 | u*U*ugcUgCUuggcUaGcucca*g*c | 454 |
| 100502 | g*g*agcuAgCCAagcagcaaau | 308 | a*U*uugCuGCuuggCuAgcucc*a*g | 455 |
| 100503 | g*a*gcuaGcCAAgcagcaaauc | 309 | g*A*uuuGcUGcuugGcUagcuc*c*a | 456 |
| 100504 | a*g*cuagCcAAGcagcaaaucc | 310 | g*G*auuUgCUgcuuGgCuagcu*c*c | 457 |
| 100505 | g*c*uagcCaAGCagcaaauccu | 311 | a*G*gauUuGCugcuUgGcuagc*u*c | 458 |
| 100506 | u*a*gccaAgCAGcaaauccugg | 312 | c*C*aggAuUUgcugCuUggcua*g*c | 459 |
| 100507 | g*c*caagCaGCAaauccuggau | 313 | a*U*ccaGgAUuugcUgCuuggc*u*a | 460 |
| 100508 | u*g*accaGuCGUcccagaauaa | 314 | u*U*auuCuGGgacgAcUgguca*g*g | 461 |
| 100509 | a*c*caguCgUCCcagaauaacu | 315 | a*G*uuaUuCUgggaCgAcuggu*c*a | 462 |
| 100510 | c*g*ucccAgAAUaacucauccu | 316 | a*G*gauGaGUuauuCuGggacg*a*c | 463 |
| 100511 | c*g*cugaCcAGAgcccuccgga | 317 | u*C*cggAgGGcucuGgUcagcg*c*u | 464 |
| 100512 | g*c*ugacCaGAGcccuccggag | 318 | C*U*ccgGaGGgcucUgGucagc*g*c | 465 |
| 100513 | c*u*gaccAgAGCccuccggaga | 319 | u*C*uccGgAGggcuCuGgucag*c*g | 466 |
| 100514 | u*g*accaGaGCCcuccggagac | 320 | g*U*cucCgGAgggcUcUgguca*g*c | 467 |
| 100515 | g*a*ccagAgCCCuccggagacu | 321 | a*G*ucuCcGGagggCuCugguc*a*g | 468 |
| 100516 | a*c*cagaGcCCUccggagacua | 322 | u*A*gucUcCGgaggGcUcuggu*c*a | 469 |
| 100517 | a*g*ggaaUgGGGaggaggucau | 323 | a*U*gacCuCCucccCaUucccu*g*g | 470 |
| 100518 | a*g*gaggUcAUCagcuuugcua | 324 | u*A*gcaAaGCugauGaCcuccu*c*c | 471 |
| 100519 | g*a*ggucAuCAGcuuugcuacu | 325 | a*G*uagCaAAgcugAuGaccuc*c*u | 472 |
| 100520 | g*c*uuugCuACUgucacagacu | 326 | a*G*ucuGuGAcaguAgCaaagc*u*g | 473 |
| 100521 | c*g*guccCaCCAccuguaccau | 327 | a*U*gguAcAGguggUgGgaccg*a*g | 474 |
| 100522 | g*g*ucccAcCACcuguaccaug | 328 | c*A*uggUaCAggugGuGggacc*g*a | 475 |
| 100523 | g*u*cccaCcACCuguaccaugc | 329 | g*C*augGuACagguGgUgggac*c*g | 476 |
| 100524 | u*c*ccacCaCCUguaccaugcc | 330 | g*G*cauGgUAcaggUgGuggga*c*c | 477 |
| 100525 | c*c*caccAcCUGuaccaugccc | 331 | g*G*gcaUgGUacagGuGguggg*a*c | 478 |
| 100526 | C*c*accaCcUGUaccaugcccg | 332 | c*G*ggcAuGGuacaGgUggugg*g*a | 479 |
| 100527 | c*a*ccacCuGUAccaugcccgc | 333 | g*C*gggCaUGguacAgGuggug*g*g | 480 |
| 100528 | a*c*caccUgUACcaugcccgcc | 334 | g*G*cggGcAUgguaCaGguggu*g*g | 481 |
| 100529 | c*c*accuGuACCaugcccgccu | 335 | a*G*gcgGgCAugguAcAggugg*u*g | 482 |
| 100530 | c*a*ccugUaCCAugcccgccug | 336 | c*A*ggcGgGCauggUaCaggug*g*u | 483 |
| 100531 | c*c*acccUuCCUggcacucuuu | 337 | a*A*agaGuGCcaggAaGggugg*g*g | 484 |
| 100532 | c*c*cuucCuGGCacucuuugcu | 338 | a*G*caaAgAGugccAgGaaggg*u*g | 485 |
| 100533 | u*g*gcacUcUUUgcuugaggau | 339 | a*U*ccuCaAGcaaaGaGugcca*g*g | 486 |
| 100534 | g*c*acucUuUGCuugaggaucu | 340 | a*G*aucCuCAagcaAaGagugc*c*a | 487 |
| 100535 | c*a*cucuUuGCUugaggaucuu | 341 | a*A*gauCcUCaagcAaAgagug*c*c | 488 |
| 100536 | c*u*agugGcUUGaggggugaga | 342 | u*C*ucaCcCCucaaGcCacuag*a*g | 489 |
| 100537 | g*g*cuugAgGGGugagaagucu | 343 | a*G*acuUcUCacccCuCaagcc*a*c | 490 |
| 100538 | g*a*agucUgGUGuccugaaacu | 344 | a*G*uuuCaGGacacCaGacuuc*u*c | 491 |
| 100539 | u*g*guguCcUGAaacugcaacu | 345 | a*G*uugCaGUuucaGgAcacca*g*a | 492 |
| 100540 | g*g*ugucCuGAAacugcaacua | 346 | u*A*guuGcAGuuucAgGacacc*a*g | 493 |
| 100541 | c*a*gcccUuCCUagagcuuaag | 347 | c*U*uaaGcUCuaggAaGggcug*c*u | 494 |
| 100542 | g*c*ccuuCcUAGagcuuaagau | 348 | a*U*cuuAaGCucuaGgAagggc*u*g | 495 |
| 100543 | g*a*gcuuAaGAUccgagccaau | 349 | a*U*uggCuCGgaucUuAagcuc*u*a | 496 |
| 100544 | c*c*auuaCgUAGacuuccagga | 350 | u*C*cugGaAGucuaCgUaaugg*u*c | 497 |
| 100545 | c*c*cgagGgGUAccagcugaau | 351 | a*U*ucaGcUGguacCcCucggg*c*u | 498 |
| 100546 | c*g*agggGuACCagcugaauua | 352 | u*A*auuCaGCugguAcCccucg*g*g | 499 |
| 100547 | g*g*uaccAgCUGaauuacugca | 353 | u*G*cagUaAUucagCuGguacc*c*c | 500 |
| 100548 | g*u*accaGcUGAauuacugcag | 354 | C*U*gcaGuAAuucaGcUgguac*c*c | 501 |
| 100549 | u*a*ccagCuGAAuuacugcagu | 355 | a*C*ugcAgUAauucAgCuggua*c*c | 502 |
| 100550 | a*c*cagcUgAAUuacugcagug | 356 | C*A*cugCaGUaauuCaGcuggu*a*c | 503 |
| 100551 | c*c*agcuGaAUUacugcagugg | 357 | c*C*acuGcAGuaauUcAgcugg*u*a | 504 |
| 100552 | a*g*cugaAuUACugcagugggc | 358 | g*C*ccaCuGCaguaAuUcagcu*g*g | 505 |
| 100553 | g*c*ugaaUuACUgcagugggca | 359 | u*G*cccAcUGcaguAaUucagc*u*g | 506 |
| 100554 | c*u*gaauUaCUGcagugggcag | 360 | c*U*gccCaCUgcagUaAuucag*c*u | 507 |
| 100555 | a*u*uacuGcAGUgggcagugcc | 361 | g*G*cacUgCCcacuGcAguaau*u*c | 508 |
| 100556 | g*g*cauuGcUGCcucuuuccau | 362 | a*U*ggaAaGAggcaGcAaugcc*u*g | 509 |
| 100557 | g*c*auugCuGCCucuuuccauu | 363 | a*A*uggAaAGaggcAgCaaugc*c*u | 510 |
| 100558 | c*u*cuuuCcAUUcugccgucuu | 364 | a*A*gacGgCAgaauGgAaagag*g*c | 511 |
| 100559 | u*c*agccUcCUCaaagccaaca | 365 | u*G*uugGcUUugagGaGgcuga*a*g | 512 |
| 100560 | c*a*gccuCcUCAaagccaacaa | 366 | u*U*guuGgCUuugaGgAggcug*a*a | 513 |
| 100561 | u*c*cucaAaGCCaacaauccuu | 367 | a*A*ggaUuGUuggcUuUgagga*g*g | 514 |
| 100562 | u*c*ucucCuCUAccuggaucau | 368 | a*U*gauCcAGguagAgGagaga*g*a | 515 |
| 100563 | u*c*uccuCuACCuggaucauaa | 369 | u*U*augAuCCagguAgAggaga*g*a | 516 |
| 100564 | c*u*ccucUaCCUggaucauaau | 370 | a*U*uauGaUCcaggUaGaggag*a*g | 517 |
| 100565 | u*a*ccugGaUCAuaauggcaau | 371 | a*U*ugcCaUUaugaUcCaggua*g*a | 518 |
| 100566 | c*c*uggaUcAUAauggcaaugu | 372 | a*C*auuGcCAuuauGaUccagg*u*a | 519 |
| 100567 | a*u*cauaAuGGCaaugugguca | 373 | u*G*accAcAUugccAuUaugau*c*c | 520 |
| 100568 | u*c*auaaUgGCAauguggucaa | 374 | u*U*gacCaCAuugcCaUuauga*u*c | 521 |
| 100569 | c*a*uaauGgCAAuguggucaag | 375 | c*U*ugaCcACauugCcAuuaug*a*u | 522 |
| 100570 | a*u*aaugGcAAUguggucaaga | 376 | u*C*uugAcCAcauuGcCauuau*g*a | 523 |
| 100571 | u*a*auggCaAUGuggucaagac | 377 | g*U*cuuGaCCacauUgCcauua*u*g | 524 |
| 100572 | a*a*uggcAaUGUggucaagacg | 378 | c*G*ucuUgACcacaUuGccauu*a*u | 525 |
| 100573 | c*a*auguGgUCAagacggaugu | 379 | a*C*aucCgUCuugaCcAcauug*c*c | 526 |
| 100574 | c*a*agacGgAUGugccagauau | 380 | a*U*aucUgGCacauCcGucuug*a*c | 527 |
| 100575 | g*a*ggccUgUGGcugcagcuag | 381 | c*U*agcUgCAgccaCaGgccuc*c*a | 528 |
| 100576 | a*g*gccuGuGGCugcagcuagc | 382 | g*C*uagCuGCagccAcAggccu*c*c | 529 |
| 100577 | g*g*ccugUgGCUgcagcuagca | 383 | u*G*cuaGcUGcagcCaCaggcc*u*c | 530 |
| 100578 | g*c*cuguGgCUGcagcuagcaa | 384 | u*U*gcuAgCUgcagCcAcaggc*c*u | 531 |
| 100579 | c*c*ugugGcUGCagcuagcaag | 385 | c*U*ugcUaGCugcaGcCacagg*c*c | 532 |
| 100580 | g*c*uuugGaGUGaagagaccaa | 386 | u*U*gguCuCUucacUcCaaagc*c*c | 533 |
| 100581 | c*a*accaCcUGGcaauaugacu | 387 | a*G*ucaUaUUgccaGgUgguug*u*u | 534 |
| 100582 | a*c*caccUgGCAauaugacuca | 388 | u*G*aguCaUAuugcCaGguggu*u*g | 535 |
| 100583 | c*a*ccugGcAAUaugacucacu | 389 | a*G*ugaGuCAuauuGcCaggug*g*u | 536 |
| 100584 | g*g*acccAaAUGggcacuuucu | 390 | a*G*aaaGuGCccauUuGggucc*c*a | 537 |
| 100585 | c*c*caaaUgGGCacuuucuugu | 391 | a*C*aagAaAGugccCaUuuggg*u*c | 538 |
| 100586 | c*a*aaugGgCACuuucuugucu | 392 | a*G*acaAgAAagugCcCauuug*g*g | 539 |
| 100587 | g*g*cacuUuCUUgucugagacu | 393 | a*G*ucuCaGAcaagAaAgugcc*c*a | 540 |
| 100588 | c*a*cuuuCuUGUcugagacucu | 394 | a*G*aguCuCAgacaAgAaagug*c*c | 541 |
| 100589 | c*u*ugucUgAGAcucuggcuua | 395 | u*A*agcCaGAgucuCaGacaag*a*a | 542 |
| 100590 | a*g*ggaaGgCAGagaaaaauua | 396 | u*A*auuUuUCucugCcUucccu*c*c | 543 |
| 100591 | g*g*gaagGcAGAgaaaaauuac | 397 | g*U*aauUuUUcucuGcCuuccc*u*c | 544 |
| 100592 | a*g*ccucUcCCAagaugagaaa | 398 | u*U*ucuCaUCuuggGaGaggcu*a*a | 545 |
| 100593 | c*c*ucucCcAAGaugagaaagu | 399 | a*C*uuuCuCAucuuGgGagagg*c*u | 546 |
| 100594 | c*u*cccaAgAUGagaaaguccu | 400 | a*G*gacUuUCucauCuUgggag*a*g | 547 |
| 100595 | g*g*ggagGaGGAagcagauaga | 401 | u*C*uauCuGCuuccUcCucccc*u*c | 548 |
| 100596 | g*g*gaggAgGAAgcagauagau | 402 | a*U*cuaUcUGcuucCuCcuccc*c*u | 549 |
| 100597 | c*a*gaaaCaGGAgucaggaaaa | 403 | u*U*uucCuGAcuccUgUuucug*g*g | 550 |
| 100598 | g*c*acuaAgCCUaagaaguucc | 404 | g*G*aacUuCUuaggCuUagugc*c*u | 551 |
| 100599 | c*c*cacuGgGAGacaagcauuu | 405 | a*A*augCuUGucucCcAguggg*u*c | 552 |
| 100600 | c*c*acugGgAGAcaagcauuua | 406 | u*A*aauGcUUgucuCcCagugg*g*u | 553 |
| 100601 | a*c*ugggAgACAagcauuuaua | 407 | u*A*uaaAuGCuuguCuCccagu*g*g | 554 |
| 100602 | u*g*ggagAcAAGcauuuauacu | 408 | a*G*uauAaAUgcuuGuCuccca*g*u | 555 |
| 100603 | g*g*gagaCaAGCauuuauacuu | 409 | a*A*guaUaAAugcuUgUcuccc*a*g | 556 |
| 100604 | g*a*caagCaUUUauacuuucuu | 410 | a*A*gaaAgUAuaaaUgCuuguc*u*c | 557 |
| 100605 | g*a*gccaCcGCGccuggcuuau | 411 | a*U*aagCcAGgcgcGgUggcuc*a*c | 558 |
| 100606 | c*c*accgCgCCUggcuuauacu | 412 | a*G*uauAaGCcaggCgCggugg*c*u | 559 |
| 100607 | a*c*cgcgCcUGGcuuauacuuu | 413 | a*A*aguAuAAgccaGgCgcggu*g*g | 560 |
| 100608 | c*g*cgccUgGCUuauacuuucu | 414 | a*G*aaaGuAUaagcCaGgcgcg*g*u | 561 |
| 100609 | g*c*gccuGgCUUauacuuucuu | 415 | a*A*gaaAgUAuaagCcAggcgc*g*g | 562 |
| 100610 | c*g*ccugGcUUAuacuuucuua | 416 | u*A*agaAaGUauaaGcCaggcg*c*g | 563 |
| 100611 | g*c*cuggCuUAUacuuucuuaa | 417 | u*U*aagAaAGuauaAgCcaggc*g*c | 564 |
| 100612 | c*c*uggcUuAUAcuuucuuaau | 418 | a*U*uaaGaAAguauAaGccagg*c*g | 565 |
| 100613 | u*g*gcuuAuACUuucuuaauaa | 419 | u*U*auuAaGAaaguAuAagcca*g*g | 566 |
| 100614 | g*g*cuuaUaCUUucuuaauaaa | 420 | u*U*uauUaAGaaagUaUaagcc*a*g | 567 |
| 100615 | c*u*uauaCuUUCuuaauaaaaa | 421 | u*U*uuuAuUAagaaAgUauaag*c*c | 568 |
| 100616 | a*g*ggguGuCCAcaaagucaaa | 422 | u*U*ugaCuUUguggAcAccccu*g*a | 569 |
| 100617 | g*g*ggugUcCACaaagucaaag | 423 | c*U*uugAcUUugugGaCacccc*u*g | 570 |
| 100618 | u*c*auaaUaAUAcuaacauguu | 424 | a*A*cauGuUAguauUaUuauga*a*a | 571 |
| 100619 | a*c*uaacAuGUUauuugccuuu | 425 | a*A*aggCaAAuaacAuGuuagu*a*u | 572 |
| 100620 | g*u*uauuUgCCUuuugaauucu | 426 | a*G*aauUcAAaaggCaAauaac*a*u | 573 |
| 100621 | u*g*ccuuUuGAAuucucauuau | 427 | a*U*aauGaGAauucAaAaggca*a*a | 574 |
| 100622 | g*c*cuuuUgAAUucucauuauc | 428 | g*A*uaaUgAGaauuCaAaaggc*a*a | 575 |
| 100623 | c*c*uuuuGaAUUcucauuaucu | 429 | a*G*auaAuGAgaauUcAaaagg*c*a | 576 |
| 100624 | c*u*uuugAaUUCucauuaucuu | 430 | a*A*gauAaUGagaaUuCaaaag*g*c | 577 |
| 100625 | u*g*aauuCuCAUuaucuuaaaa | 431 | u*U*uuaAgAUaaugAgAauuca*a*a | 578 |
| 100626 | g*a*auucUcAUUaucuuaaaau | 432 | a*U*uuuAaGAuaauGaGaauuc*a*a | 579 |
| 100627 | c*c*guguGaCAUgugauuacau | 433 | a*U*guaAuCAcaugUcAcacgg*c*c | 580 |
| 100628 | u*g*ugacAuGUGauuacaucau | 434 | a*U*gauGuAAucacAuGucaca*c*g | 581 |
| 100629 | u*g*acauGuGAUuacaucaucu | 435 | a*G*augAuGUaaucAcAuguca*c*a | 582 |
| 100630 | g*a*caugUgAUUacaucaucuu | 436 | a*A*gauGaUGuaauCaCauguc*a*c | 583 |
| 100631 | u*c*uuucUgACAucauuguuaa | 437 | u*U*aacAaUGauguCaGaaaga*u*g | 584 |
| 100632 | c*u*uucuGaCAUcauuguuaau | 438 | a*U*uaaCaAUgaugUcAgaaag*a*u | 585 |
| 100633 | g*a*caucAuUGUuaauggaaug | 439 | C*A*uucCaUUaacaAuGauguc*a*g | 586 |
| 100634 | g*u*uaauGgAAUgugugcuugu | 440 | a*C*aagCaCAcauuCcAuuaac*a*a | 587 |

Abbreviation: (*) = PS bond; (-) = PO bond; lower case = 2′-OMe; capital = 2′-F; rX = RNA; dX = DNA; invAb = inverted abasic; Tgn = thymidine-glycol nucleic acid (GNA) S-Isomer; i = inosine; invdN = inverted deoxyribonucleotide (3′-3′ linked nucleotide or 5′-5′ linked nucleotide) Agn = adenosine-glycol nucleic acid (GNA) S-Isomer; Cgn = cytidine-glycol nucleic acid (GNA) S-Isomer; VP = 5′-E-Vinyl-phosphonate.

TABLE 3
Results of single dose screens at 10 nM and 0.1
nM in Huh7 cells using the selected modified INHBE
siRNAs shown as % inhibition Average and SD.

| | 10 nM | 10 nM | 0.1 nM | 0.1 nM |
|---|---|---|---|---|
| Compound ID | MEAN | SD | Mean | SD |
| 100488 | −5.35 | 5.35 | −38.35 | 54.87 |
| 100489 | 37.83 | 9.72 | −25.09 | 23.01 |
| 100490 | 33.23 | 4.19 | 2.17 | 17.95 |
| 100491 | 33.01 | 5.79 | −2.32 | 7.93 |
| 100492 | 62.61 | 3.47 | 37.88 | 14.26 |
| 100493 | 52.64 | 4.18 | 5.94 | 12.72 |
| 100494 | 66.97 | 5.86 | −8.14 | 13.30 |
| 100495 | 17.99 | 18.55 | −38.42 | 5.00 |
| 100496 | −1.87 | 2.86 | −12.67 | 65.05 |
| 100497 | 11.41 | 8.24 | −27.87 | 4.39 |
| 100498 | 6.01 | 9.66 | 2.04 | 12.74 |
| 100499 | 8.46 | 26.75 | −35.43 | 8.51 |
| 100500 | 41.01 | 12.56 | 28.92 | 19.85 |
| 100501 | 65.34 | 2.08 | 40.38 | 7.72 |
| 100502 | 35.53 | 10.67 | 45.79 | 8.53 |
| 100503 | −5.01 | 7.58 | −22.95 | 6.70 |
| 100504 | −0.27 | 15.93 | −7.15 | 11.52 |
| 100505 | 60.17 | 2.80 | −7.48 | 14.07 |
| 100506 | 66.21 | 0.85 | 9.93 | 4.35 |
| 100507 | 72.48 | 2.01 | 20.90 | 3.77 |
| 100508 | 46.83 | 1.89 | 26.11 | 6.19 |
| 100509 | 81.14 | 4.63 | 38.85 | 18.83 |
| 100510 | 36.30 | 22.83 | 13.27 | 37.06 |
| 100511 | 2.34 | 12.26 | −4.98 | 9.67 |
| 100512 | −10.95 | 3.33 | −17.49 | 2.44 |
| 100513 | 2.67 | 2.85 | −3.68 | 2.34 |
| 100514 | −2.59 | 9.74 | −3.02 | 10.27 |
| 100515 | 27.36 | 12.13 | 7.48 | 8.08 |
| 100516 | 9.59 | 11.30 | 13.53 | 11.12 |
| 100517 | 23.71 | 9.63 | 23.04 | 28.34 |
| 100518 | 36.59 | 8.04 | 2.30 | 7.98 |
| 100519 | 64.14 | 3.60 | 35.23 | 15.42 |
| 100520 | 33.42 | 3.20 | −4.67 | 20.21 |
| 100521 | 15.52 | 13.25 | −23.84 | 3.48 |
| 100522 | −33.65 | 11.75 | −11.62 | 10.71 |
| 100523 | 7.10 | 9.53 | −1.90 | 14.80 |
| 100524 | −7.80 | 4.06 | −10.19 | 8.80 |
| 100525 | −4.53 | 4.74 | −6.45 | 10.07 |
| 100526 | −21.17 | 15.69 | −33.23 | 20.13 |
| 100527 | −45.62 | 22.22 | −25.92 | 18.84 |
| 100528 | −26.98 | 12.15 | −5.43 | 22.85 |
| 100529 | −3.72 | 4.98 | −13.90 | 4.38 |
| 100530 | 4.07 | 5.95 | −0.27 | 9.78 |
| 100531 | 22.47 | 6.13 | 16.97 | 7.18 |
| 100532 | 15.61 | 7.43 | 19.46 | 17.58 |
| 100533 | 26.41 | 7.79 | 9.36 | 8.87 |
| 100534 | 34.02 | 3.29 | −11.20 | 6.44 |
| 100535 | 85.19 | 3.13 | 34.61 | 5.39 |
| 100536 | −3.01 | 18.07 | −25.60 | 10.69 |
| 100537 | 8.81 | 16.07 | −30.49 | 19.16 |
| 100538 | −2.31 | 22.08 | −5.04 | 13.00 |
| 100539 | 21.46 | 13.90 | 4.71 | 18.36 |
| 100540 | 45.70 | 28.80 | 0.07 | 8.28 |
| 100541 | 49.25 | 8.91 | 10.43 | 7.94 |
| 100542 | 33.24 | 11.87 | −0.17 | 11.73 |
| 100543 | 41.67 | 14.86 | 8.09 | 27.00 |
| 100544 | 4.52 | 5.12 | 2.61 | 11.66 |
| 100545 | 28.05 | 31.74 | 14.39 | 42.11 |
| 100546 | 37.79 | 12.09 | −1.95 | 12.26 |
| 100547 | −25.80 | 4.06 | −54.29 | 25.21 |
| 100548 | −12.11 | 21.78 | −49.30 | 7.75 |
| 100549 | 58.93 | 1.75 | −20.45 | 19.96 |
| 100550 | −4.66 | 6.98 | 2.61 | 8.97 |
| 100551 | 22.47 | 0.21 | 0.37 | 6.39 |
| 100552 | −16.76 | 27.81 | 0.37 | 13.86 |
| 100553 | −1.38 | 14.62 | −31.00 | 16.34 |
| 100554 | 6.08 | 28.04 | −12.79 | 19.47 |
| 100555 | 3.70 | 11.78 | −2.77 | 9.74 |
| 100556 | 44.87 | 2.94 | 16.18 | 2.60 |
| 100557 | 76.66 | 2.23 | 52.70 | 1.33 |
| 100558 | 62.62 | 4.14 | 34.69 | 3.68 |
| 100559 | 28.15 | 5.10 | 18.72 | 20.77 |
| 100560 | 37.94 | 22.04 | −6.69 | 23.88 |
| 100561 | 68.11 | 6.19 | 31.17 | 6.84 |
| 100562 | 26.76 | 1.80 | 25.79 | 12.14 |
| 100563 | 77.60 | 0.75 | 69.69 | 3.31 |
| 100564 | 70.51 | 0.56 | 47.60 | 4.97 |
| 100565 | 75.19 | 1.77 | 64.73 | 3.92 |
| 100566 | 47.23 | 12.69 | 23.51 | 5.52 |
| 100567 | 58.40 | 7.24 | 1.61 | 24.05 |
| 100568 | 73.44 | 0.72 | 36.93 | 3.46 |
| 100569 | 85.47 | 0.81 | 27.85 | 23.08 |
| 100570 | 63.92 | 2.80 | 39.92 | 9.93 |
| 100571 | 73.26 | 12.14 | 24.30 | 6.65 |
| 100572 | 58.31 | 4.40 | 14.67 | 6.54 |
| 100573 | 82.91 | 2.36 | 36.04 | 2.19 |
| 100574 | 80.59 | 0.59 | 60.99 | 6.06 |
| 100575 | 47.59 | 24.11 | 23.03 | 12.74 |
| 100576 | 34.93 | 25.86 | 26.51 | 33.73 |
| 100577 | 12.18 | 20.28 | 24.40 | 0.62 |
| 100578 | 57.62 | 2.89 | 30.66 | 4.41 |
| 100579 | 46.56 | 3.86 | 28.50 | 16.18 |
| 100580 | 77.56 | 3.09 | 62.93 | 3.55 |
| 100581 | 61.60 | 7.82 | 35.76 | 7.39 |
| 100582 | 35.56 | 11.61 | 14.33 | 3.68 |
| 100583 | 26.60 | 11.02 | −29.00 | 5.86 |
| 100584 | 49.62 | 10.36 | 39.66 | 5.41 |
| 100585 | 55.47 | 4.71 | 33.40 | 8.89 |
| 100586 | 57.59 | 946.65 | 57.48 | 2.91 |
| 100587 | 61.43 | 6.19 | 35.20 | 8.80 |
| 100588 | 74.82 | 0.61 | 43.78 | 5.03 |
| 100589 | 77.21 | 1.32 | 72.42 | 7.41 |
| 100590 | −10.86 | 8.29 | −8.61 | 10.34 |
| 100591 | 23.74 | 3.05 | −0.83 | 9.84 |
| 100592 | 44.68 | 1.51 | 17.87 | 5.46 |
| 100593 | 25.04 | 24.50 | 8.82 | 49.83 |
| 100594 | 56.17 | 11.48 | 10.22 | 55.97 |
| 100595 | 46.61 | 1.94 | 0.06 | 6.23 |
| 100596 | 26.00 | 8.58 | −4.84 | 25.31 |
| 100597 | 54.05 | 1.65 | 37.73 | 2.68 |
| 100598 | 53.90 | 7.21 | 29.24 | 6.23 |
| 100599 | 44.04 | 13.44 | 20.95 | 13.84 |
| 100600 | 58.54 | 5.93 | 52.44 | 5.82 |
| 100601 | 66.62 | 6.01 | 59.79 | 3.95 |
| 100602 | 54.88 | 13.17 | 44.11 | 5.65 |
| 100603 | 64.42 | 5.51 | 57.19 | 3.57 |
| 100604 | 81.15 | 1.68 | 70.42 | 5.87 |
| 100605 | −22.92 | 9.16 | −51.17 | 8.84 |
| 100606 | 33.44 | 6.94 | −51.72 | 16.18 |
| 100607 | 21.71 | 11.71 | −18.49 | 9.38 |
| 100608 | 48.27 | 3.33 | 31.48 | 5.29 |
| 100609 | 54.85 | 6.31 | 42.50 | 5.50 |
| 100610 | 45.02 | 3.84 | 60.83 | 5.59 |
| 100611 | 55.49 | 11.13 | 66.79 | 6.64 |
| 100612 | 74.28 | 3.53 | 67.82 | 7.71 |
| 100613 | 77.76 | 0.38 | 76.84 | 0.48 |
| 100614 | 70.48 | 1.17 | 66.71 | 4.23 |
| 100615 | 75.16 | 2.43 | 60.80 | 15.84 |
| 100616 | 24.73 | 15.95 | 48.26 | 7.56 |
| 100617 | 43.65 | 16.26 | 13.90 | 5.70 |
| 100618 | 66.45 | 4.43 | 55.43 | 25.80 |
| 100619 | 63.86 | 18.07 | 59.99 | 8.47 |
| 100620 | 64.18 | 3.56 | 42.90 | 11.82 |
| 100621 | 68.17 | 1.40 | 66.24 | 5.45 |
| 100622 | 43.81 | 6.21 | 15.94 | 12.38 |
| 100623 | 73.30 | 2.99 | 56.78 | 2.34 |
| 100624 | 71.82 | 4.23 | 45.80 | 2.40 |
| 100625 | 72.15 | 1.49 | 71.54 | 1.93 |
| 100626 | 46.27 | 5.87 | 60.75 | 4.49 |
| 100627 | 61.59 | 4.07 | 60.24 | 4.80 |
| 100628 | 70.82 | 2.90 | 63.11 | 2.26 |
| 100629 | 74.35 | 1.86 | 73.52 | 1.63 |
| 100630 | 62.37 | 1.45 | 37.68 | 9.75 |
| 100631 | −56.56 | 14.48 | −23.69 | 20.04 |
| 100632 | 62.92 | 0.50 | 48.87 | 5.08 |
| 100633 | 34.44 | 10.48 | 45.64 | 17.04 |
| 100634 | 18.76 | 15.92 | −7.97 | 14.05 |

### Example 2. In Vitro Dose-Response Screen in Huh7 Cell Line

[0128] This example describes a screen of exemplary INHBE siRNA compounds in primary human hepatocytes (PHH) cells in a single dose screen at 70% nM, 33 nM, 1 IM, 3.7 nM, 1.2 nM, 0.412 nM, 0.137 nM, and 0.046 nM of the selected siRNA (Table 2). INHBE mRNA level was measured by quantitative PCR and normalized to GAPDH relative to mock treated control cells and the average KD and SD was determined. The data are presented as percent inhibition of INHBE mRNAs in the cells treated with siRNAs relatives to INHBE mRNA in the PBS control cells. Table 4 and FIG. 2 show the results of the in vitro dose-response INHBE siRNA screens.

TABLE 4
INHBE mRNA Max inhibition (%) and IC50
(nM) for exemplary INHBE siRNAs.

| Compound ID | IC50 (nM) | Max inhibition |
|---|---|---|
| 100494 | 0.879527207 | 60% |
| 100506 | 3.168648402 | 70% |
| 100509 | 0.288812209 | 62% |
| 100519 | 0.133171004 | 69% |
| 100535 | 0.102147368 | 78% |
| 100557 | 0.117147936 | 63% |
| 100561 | 0.447047125 | 71% |
| 100563 | 0.055169498 | 76% |
| 100569 | 0.720001201 | 79% |
| 100580 | 0.033891417 | 68% |
| 100589 | 0.015619441 | 70% |
| 100604 | 0.289690693 | 71% |
| 100613 | 0.042248546 | 74% |
| 100625 | 0.014322142 | 70% |
| 100629 | 0.057614467 | 64% |

### Example 3. In Vitro Dose-Response Screen in Primary Human Hepatocytes

[0129] This example describes a screen of exemplary INHBE siRNA compounds in primary human hepatocytes (PHH) cells in a single dose screen at 10 nM and 1 nM of the selected siRNA (Table 2). INHBE mRNA level was measured by quantitative PCR and normalized to GAPDH relative to mock treated control cells and the mean KD and SD was determined. The data are presented as percent inhibition of INHBE mRNAs in the cells treated with siRNAs relative to INHBE mRNA in the PBS control cells. Table 5 and FIG. 3 show the results of the in vitro dose-response INHBE siRNA screens.

TABLE 5
Results of single dose screens at 10 nM and 0.1
nM in Huh7 cells using the selected modified INHBE
siRNAs shown as % inhibition MEAN and SD.

| Compound ID | 10 nM MEAN | 10 nM SD | 1 nM MEAN | 1 nM SD |
|---|---|---|---|---|
| 100494 | 10.7 | 22.4 | −22.5 | 4.0 |
| 100506 | −13.0 | 15.9 | −30.9 | 14.1 |
| 100509 | 40.1 | 19.4 | −16.7 | 10.5 |
| 100519 | 37.1 | 11.9 | 0.2 | 22.0 |
| 100535 | 51.9 | 4.1 | 13.7 | 9.8 |
| 100557 | 29.2 | 13.3 | −2.5 | 13.2 |
| 100561 | 26.8 | 14.3 | −13.5 | 6.6 |
| 100563 | 60.1 | 9.7 | 26.5 | 3.5 |
| 100569 | 4.4 | 10.2 | 5.1 | 23.5 |
| 100580 | 35.6 | 5.7 | 9.6 | 8.5 |
| 100589 | 37.8 | 6.4 | 21.7 | 12.9 |
| 100604 | 48.6 | 4.9 | 30.9 | 6.9 |
| 100613 | 50.8 | 3.1 | 31.8 | 5.9 |
| 100625 | 55.7 | 2.8 | 35.7 | 11.1 |
| 100629 | 45.7 | 5.6 | 5.1 | 5.0 |

### Example 4. Evaluation of Knockdown of Human INHBE with Select siRNAs in In Vivo Mouse Hydrodynamic Injection (HDI) Model

[0130] 13 Exemplary siRNA compounds (Compounds 100635-100647) were tested for knockdown of human INHBE in a mouse model hydrodynamic injected with DNA plasmid encoding the full-length human INHBE transcript. Briefly, 6-7-week-old female BALB/c mice were subcutaneously injected with INHBE siRNA compounds from Table 6 at 1 mg/kg. Three days post injection, the mice were hydrodynamically injected with a DNA plasmid encoding the full-length human INHBE transcript. One day after the injection of the plasmid, liver samples were harvested and analyzed for INHBE mRNA expression relative to mice treated with the same volume of PBS. INHBE mRNA levels were measured by quantitative PCR and normalized to NEO gene included in the plasmid used to express INHBE. The data are presented as relative gene expression of INHBE mRNA in the liver relative to PBS treated animals.

[0131] The modified and unmodified sense and antisense strand sequences of Compounds 100329-100341 are summarized in Tables 6-7.

[0132] Table 8 and FIG. 4 show the results of single dose INHBE siRNA injection in INHBE BALB/c mice. The results show, that siRNA compounds 100635, 100638, 100639, 100642, 100643, 100644, 100645 and 100646 reduce INHBE expression by more than 80%. Additionally, compounds 100635-100646 all showed improved potency relative to siRNA compound 100647.

TABLE 6
Exemplary tri-GalNAc6 or L96 conjugated, modified INHBE siRNA
compounds, wherein the sense strand is conjugated to 5′-triGalNAc6, 3′-triGalNAc6, or 3′-
L96 targeting INHBE mRNA.

[chemical structure]

Tri-GalNAc6

[chemical structure]

L96 ligand

[chemical structure]

Modified siRNA nucleotide sugar, wherein B is the nucleotide base uracil (nucleotide
abbreviation: tmU) or cytosine (nucleotide abbreviation tmC)

[chemical structure]

TNA analog, wherein B is a uracil base (abbreviation: utU) or an adenine base (abbreviation
utA)

[chemical structure]

Glycol Nucleic Acid (GNA)

| Com- | | SEQ | | SEQ |
|---|---|---|---|---|
| pound | | ID | Antisense 5′-3′ | ID |
| ID | Sense 5′-3′ (modified) | NO: | (modified) | NO: |
| 100 | a*c*ucuUuGCUuGaggaucuu (L6) | 607 | va*A*gAuCcUcaagcAaAgagug*c*c | 616 |
| 635 | | | | |
| 100 | (L6)invdT*a*c*ucuUuGCUuGaggaucuu*u*u | 625 | va*A*gAuCcUcaagcAaAgagug*c*c | 632 |
| 636 | | | | |
| 100 | (L6) invdT*a*c*ucuUuGCUuGagga (utU)cuu*u*(tmU) | 626 | va*A*gAuCcUcaagcAaAgagug*c*c | 633 |
| 637 | | | | |
| 100 | a*c*ucuUuGCUuGagga(utU)cu(tmU)(L6) | 608 | va*A*gAuCcUcaagcAaAgagug*c*c | 617 |
| 638 | | | | |
| 100 | a *c*aagCaUUUaUacuuucuu(L6) | 609 | va*A*gaaAgUauaaaUgcuuguc*u*c | 618 |
| 639 | | | | |
| 100 | (L6) invdT*a*c*aagCaUUUaUacuuucuu*u*u | 627 | va*A*gaaAgUauaaaUgcuuguc*u*c | 634 |
| 640 | | | | |
| 100 | (L6) invdT*a*c*aagCaUUUaUacuu (tmU)cuu*u*(tmU) | 628 | va*A*gaaAgUauaaaUgcuuguc*u*c | 635 |
| 641 | | | | |
| 100 | a*c*aagCaUUUaUacuuucu(tmU)(L6) | 610 | va*A*gaaAgUauaaaUgcuuguc*u*c | 619 |
| 642 | | | | |
| 100 | g*g*cuuAuACUuUcuuaauaa(L6) | 611 | vu*U*aUuAaGaaaguAuAagcca*g*g | 620 |
| 643 | | | | |
| 100 | (L6) invdT*g*g*cuuAuACUuUcuuaauaa*u*u | 629 | vu*U*aUuAaGaaaguAuAagcca*g*g | 636 |
| 644 | | | | |
| 100 | (L6) invdT*g*g*cuuAuACUuUcuua (utA)uaa*u*(tmU) | 612 | vu*U*aUuAaGaaaguAuAagcca*g*g | 621 |
| 645 | | | | |
| 100 | g*g*cuuAuACUuUcuuaauaa (L6) | 630 | vu*U*a UuAaGaaaguAuAag(tmC)ca*g*g | 637 |
| 646 | | | | |
| 100 | C*u*gucaCaGACuccacuucau (L96) | 631 | A*U*gadAg (Tgn) ggagucUgUgacag*u*a | 638 |
| 647 | | | | |

Abbreviation: (*) = PS bond; lower case = 2′-OMe; capital = 2-F′; invdN = inverted deoxyribonucleotide (3′-3′ linked nucleotide or 5′-5′ linked nucleotide); v = 5′-E-Vinyl-phosphonate; (tmU) = siRNA nucleotide with a modified sugar and a uracil base; (utU) = a TNA analog with a uracil base, i.e., utU from above; (utA) = a TNA analog with a adenine base; i.e., utA from above; (L6) = tri-GalNAc6 ligand; (L96) = L96 ligand; (Tgn) = a thymidine-glycol nucleic acid, i.e., GNA from above; dX = DNA.

Glycol Nucleic Acid (GNA)

| Com- | | SEQ | Antisense | SEQ |
|---|---|---|---|---|
| pound | Sense 5′-3′ | ID | 5′-3′ | ID |
| ID | (modified) | NO: | (modified) | NO: |
| 100 | a*c*ucuUuGC | 607 | va*A*gAuCcU | 616 |
| 635 | UuGaggaucuu | | caagcAaAgag | |
| | (L6) | | ug*c*c | |
| 100 | (L6) invdT* | 625 | va*A*gAuCcU | 632 |
| 636 | a*c*ucuUuGC | | caagcAaAgag | |
| | UuGaggaucuu | | ug*c*c | |
| | *u*u | | | |
| 100 | (L6) invdT* | 626 | va*A*gAuCcU | 633 |
| 637 | a*c*ucuUuGC | | caagcAaAgag | |
| | UuGagga | | ug*c*c | |
| | (utU) | | | |
| | cuu*u* | | | |
| | (tmU) | | | |
| 100 | a*c*ucuUuGC | 608 | va*A*gAuCcU | 617 |
| 638 | UuGagga | | caagcAaAgag | |
| | (utU) cu | | ug*c*c | |
| | (tmU) (L6) | | | |
| 100 | a*c*aagCaUU | 609 | va*A*gaaAgU | 618 |
| 639 | UaUacuuucuu | | auaaaUgcuug | |
| | (L6) | | uc*u*c | |
| 100 | (L6) invdT* | 627 | va*A*gaaAgU | 634 |
| 640 | a*c*aagCaU | | auaaaUgcuug | |
| | UUaUacuuuc | | uc*u*c | |
| | uu*u*u | | | |
| 100 | (L6) invdT* | 628 | va*A*gaaAgU | 635 |
| 641 | a*c*aagCaUU | | auaaaUgcuug | |
| | UaUacuu | | uc*u*c | |
| | (tmU) | | | |
| | cuu*u* | | | |
| | (tmU) | | | |
| 100 | a*c*aagCaUU | 610 | va*A*gaaAgU | 619 |
| 642 | UaUacuuucu | | auaaaUgcuug | |
| | (tmU) (L6) | | uc*u*c | |
| 100 | g*g*cuuAuAC | 611 | vu*U*aUuAaG | 620 |
| 643 | UuUcuuaauaa | | aaaguAuAagc | |
| | (L6) | | ca*g*g | |
| 100 | (L6) invdT* | 629 | vu*U*aUuAaG | 636 |
| 644 | g*g*cuuAuAC | | aaaguAuAagc | |
| | UuUcuuaauaa | | ca*g*g | |
| | *u*u | | | |
| 100 | (L6) invdT* | 612 | vu*U*aUuAaG | 621 |
| 645 | g*g*cuuAuAC | | aaaguAuAagc | |
| | UuUcuua | | ca*g*g | |
| | (utA) | | | |
| | uaa*u* | | | |
| | (tmU) | | | |
| 100 | g*g*cuuAuAC | 630 | vu*U*aUuAaG | 637 |
| 646 | UuUcuuaauaa | | aaaguAuAag | |
| | (L6) | | (tmC) ca*g | |
| | | | *g | |
| 100 | C*u*gucaCaG | 631 | A*U*gadAg | 638 |
| 647 | ACuccacuucau | | (Tgn) | |
| | (L96) | | ggagucUg | |
| | | | Ugacag*u*a | |

Abbreviation:
(*) = PS bond;
lower case = 2′-OMe;
capital = 2′-F;
invdN = inverted deoxyribonucleotide (3′-3′ linked nucleotide or 5′-5′ linked nucleotide);
v = 5′-E-Vinyl-phosphonate;
(tmU) = siRNA nucleotide with a modified sugar and a uracil base;
(utU) = a TNA analog with a uracil base, i.e., utU from above;
(utA) = a TNA analog with a adenine base, i.e., utA from above;
(L6) = tri-GalNAc6 ligand;
(L96) = L96 ligand;
(Tgn) = a thymidine-glycol nucleic acid, i.e., GNA from above;
dX = DNA.

TABLE 7
INHBE siRNA unmodified sequences

| | SEQ | | SEQ |
|---|---|---|---|
| | ID | Antisense | ID |
| Sense 5′-3′ | NO: | 5′-3′ | NO: |
| ACUCUUUGCUUGA | 589 | AAGAUCCUCAAGC | 598 |
| GGAUCUU | | AAAGAGUGCC | |
| TACUCUUUGCUUG | 639 | AAGAUCCUCAAGC | 646 |
| AGGAUCUUUU | | AAAGAGUGCC | |
| TACUCUUUGCUUG | 640 | AAGAUCCUCAAGC | 647 |
| AGGAUCUUUU | | AAAGAGUGCC | |
| ACUCUUUGCUUGA | 590 | AAGAUCCUCAAGC | 599 |
| GGAUCUU | | AAAGAGUGCC | |
| ACAAGCAUUUAUA | 591 | AAGAAAGUAUAAA | 600 |
| CUUUCUU | | UGCUUGUCUC | |
| TACAAGCAUUUAU | 641 | AAGAAAGUAUAAA | 648 |
| ACUUUCUUUU | | UGCUUGUCUC | |
| TACAAGCAUUUAU | 642 | AAGAAAGUAUAAA | 649 |
| ACUUUCUUUU | | UGCUUGUCUC | |
| ACAAGCAUUUAUA | 592 | AAGAAAGUAUAAA | 601 |
| CUUUCUU | | UGCUUGUCUC | |
| GGCUUAUACUUUC | 593 | UUAUUAAGAAAGU | 602 |
| UUAAUAA | | AUAAGCCAGG | |
| TGGCUUAUACUUU | 643 | UUAUUAAGAAAGU | 650 |
| CUUAAUAAUU | | AUAAGCCAGG | |
| TGGCUUAUACUUU | 594 | UUAUUAAGAAAGU | 603 |
| CUUAAUAAUU | | AUAAGCCAGG | |
| GGCUUAUACUUUC | 644 | UUAUUAAGAAAGU | 651 |
| UUAAUAA | | AUAAGCCAGG | |
| CUGUCACAGACUC | 645 | AUGAAGTGGAGUC | 652 |
| CACUUCAU | | UGUGACAGUA | |

TABLE 8
In vivo percent knockdown (KD) in HDI model.

| Compound ID | % KD in HDI Model |
|---|---|
| 100635 | 83 |
| 100636 | 73 |
| 100637 | 79 |
| 100638 | 82 |
| 100639 | 81 |
| 100640 | 72 |
| 100641 | 69 |
| 100642 | 84 |
| 100643 | 88 |
| 100644 | 87 |
| 100645 | 84 |
| 100646 | 85 |
| 100647 | 64 |

### Example 5. Evaluation of Knockdown of Human INHBE with Select siRNAs in In Vivo Mouse Hydrodynamic Injection (HDI) Model

[0133] 12 Exemplary siRNA compounds (Compounds 100643 and 100647-100657) were tested for knockdown of human INHBE in a mouse model hydrodynamic injected with DNA plasmid encoding the full-length human INHBE transcript. Briefly, 6-7-week-old female BALB/c mice were subcutaneously injected with INHBE siRNA compounds from Table 9 at 1 or 1.5 mg/kg. Three days post injection, the mice were hydrodynamically injected with a DNA plasmid encoding the full-length human INHBE transcript. One day after the injection of the plasmid, liver samples were harvested and analyzed for INHBE mRNA expression relative to mice treated with the same volume of PBS. INHBE mRNA levels were measured by quantitative PCR and normalized to NEO gene included in the plasmid used to express INHBE. The data are presented as relative gene expression of INHBE mRNA in the liver relative to PBS treated animals.

[0134] The modified and unmodified sense and antisense strand sequences of Compounds 100643 and 100647-100657 are summarized in Tables 9-10.

[0135] FIG. 5 show the results of single dose INHBE siRNA injection in INHBE BALB/c mice. The results show, that siRNA compounds 100643, 100649, 100650, 100654, 100655, and 100657 showed improved potency relative to siRNA compound 100647.

TABLE 9
Exemplary tri-GalNAc6 or L96 conjugated, modified INHBE siRNA
compounds, wherein the sense strand is conjugated to 3′-triGalNAc6 or 3′-L96 targeting
INHBE mRNA.

[chemical structure]

Tri-GalNAc6

[chemical structure]

L96 ligand

[chemical structure]

Glycol Nucleic Acid (GNA)

| Com- | | SEQ | | SEQ |
|---|---|---|---|---|
| pound | | ID | | ID |
| ID | Sense 5′-3′ (modified) | NO: | Antisense 5′-3′ (modified) | NO: |
| 100 | g*g*cuuAuACUuUcuuaauaa (L6) | 611 | vu*U*aUuAaGaaaguAuAagcca*g*g | 620 |
| 643 | | | | |
| 100 | C*u*gucaCaGACuccacuucau (L96) | 631 | A*U*gadAg(Tgn)ggagucUgUgacag*u*a | 638 |
| 647 | | | | |
| 100 | u*g*gcuuAuACUuucuuaauaa (L96) | 653 | u*U*auuAaGAaaguAuAagcca*g*g | 660 |
| 648 | | | | |
| 100 | u*u*ggagugAAGagaccaagau (L96) | 654 | vu*U*cUuGgUcucuuCaCuccaaag | 661 |
| 649 | | | | |
| 100 | u*c*uuuccaUUCugccgucuuc (L96) | 655 | vu*A*aGaCgGcagaaUgGaaagagg | 662 |
| 650 | | | | |
| 100 | g*g*agacaaGCAuuuauacuuu (L96) | 656 | vu*A*aGuAuAaaugcUuGucuccca | 663 |
| 651 | | | | |
| 100 | a*c*aagcauUUAuacuuucuuu (L96) | 613 | vu*A*aGaAaGuauaaAuGcuugucu | 622 |
| 652 | | | | |
| 100 | u*g*aagagaCCAagaugaaguu (L96) | 614 | vu*A*cUuCaUcuuggUcUcuucacu | 623 |
| 653 | | | | |
| 100 | g*a*gacaagCAUuuauacuuuc (L96) | 657 | vu*A*aAgUaUaaaugCuUgucuccc | 664 |
| 654 | | | | |
| 100 | a*a*ugggcaCUUucuugucuga (L96) | 615 | vu*C*aGaCaAgaaagUgCccauuug | 624 |
| 655 | | | | |
| 100 | a*g*agaccaAGAugaaguuucc (L96) | 658 | vu*G*aAaCuUcaucuuggucucuuc | 665 |
| 656 | | | | |
| 100 | a*a*gaaguuCCCugguuuuucc (L96) | 659 | vu*G*aAaAaCcagggAaCuucuuag | 666 |
| 657 | | | | |

Abbreviation: (*) = PS bond; lower case = 2′-OMe; capital = 2′-F; v = 5′-E-Vinyl-phosphonate; (L96) = L96 ligand; (Tgn) = a thymidine-glycol nucleic acid, i.e., GNA from above; dX = DNA

TABLE 10
INHBE siRNA unmodified sequences

| | SEQ | | SEQ |
|---|---|---|---|
| | ID | Antisense | ID |
| Sense 5′-3′ | NO: | 5′-3′ | NO: |
| ACUCUUUGCUUGA | 593 | AAGAUCCUCAAGC | 602 |
| GGAUCUU | | AAAGAGUGCC | |
| CUGUCACAGACUC | 645 | AUGAAGTGGAGUC | 652 |
| CACUUCAU | | UGUGACAGUA | |
| UGGCUUAUACUUU | 667 | UUAUUAAGAAAGU | 675 |
| CUUAAUAA | | AUAAGCCAGG | |
| UUGGAGUGAAGAG | 668 | UUCUUGGUCUCUU | 676 |
| ACCAAGAU | | CACUCCAAAG | |
| UCUUUCCAUUCUG | 670 | UAAGACGGCAGAA | 677 |
| CCGUCUUC | | UGGAAAGAGG | |
| GGAGACAAGCAUU | 671 | UAAGUAUAAAUGC | 678 |
| UAUACUUU | | UUGUCUCCCA | |
| ACAAGCAUUUAUA | 595 | UAAGAAAGUAUAA | 604 |
| CUUUCUUU | | AUGCUUGUCU | |
| UGAAGAGACCAAG | 596 | UACUUCAUCUUGG | 605 |
| AUGAAGUU | | UCUCUUCACU | |
| GAGACAAGCAUUU | 672 | UAAAGUAUAAAUG | 679 |
| AUACUUUC | | CUUGUCUCCC | |
| AAUGGGCACUUUC | 597 | UCAGACAAGAAAG | 606 |
| UUGUCUGA | | UGCCCAUUUG | |
| AGAGACCAAGAUG | 673 | UGAAACUUCAUCU | 680 |
| AAGUUUCC | | UGGUCUCUUC | |
| AAGAAGUUCCCUG | 674 | UGAAAAACCAGGG | 681 |
| GUUUUUCC | | AACUUCUUAG | |

### Example 6. Evaluation of Knockdown of INHBE with siRNAs in In Vivo Non-Human Primate Model

[0136] Two exemplary siRNA compounds, referred to herein as Compound A and Compound B, were selected from among the compounds listed in Table 6 and Table 9, and were tested for knockdown of INHBE in a non-human primate model. Briefly, 3-8 year old male cynomolgus monkeys were subcutaneously injected with one of either INHBE siRNA Compounds A or B at 5 mg/kg (n=2-3 monkeys per compound tested). Animals were subject to clinical observation twice daily after injection. Liver biopsies were obtained 4 days prior to injection, and 56 days after injection. Liver INHBE mRNA levels were measured by quantitative PCR an normalized to the day −4 level for each individual animals.

[0137] FIG. 6 shows the results of single dose INHBE siRNA injection in cynomolgus monkeys. The results show that 69% knockdown (Compound A) and 75% knockdown (Compound B) was observed in animals at day 56 after injection (FIG. 6).

### Example 7. In Vitro Activity and Dose-Response Screen in hTLR7, hTLR8, and hTLR9 Cells

[0138] This example evaluates the agonist activity of compounds in the cell-based human TLR Toll-like receptor (hTLR) reporter assay. Exemplary siRNA compounds 100647, 100635, 100638, 100639, 100642, 100643, and 10064 were tested using commercial cell-based hTLR7, hTLR8 and hTLR9 reporter assays. Briefly, assays were performed using a 4-fold dilution from 100 nM under 9 concentrations by transfection of HEK-293 cells in duplicate, and with a duration of treatment of 24 hours. R848 was purchased from a commercial vendor and used as the agonist for the hTRL7 and hTLR8 reporter assays. ODN 2006 was purchased from a commercial vendor and used as the agonist for the hTRL9 reporter assays.

[0139] The data are presented as the level of activity in cells treated with test compounds as a fold change over the activity of unstimulated cells in the cell-based hTLR7, hTLR8, and hTLR9 reporter assays. Table 11 and FIGS. 7A-7C show the results of the cell-based hTLR7, hTLR8, and hTLR9 reporter assays. The results show that all tested siRNA compounds displayed no activity against hTLR7, hTLR8, and hTLR9 pathways.

TABLE 11
Activity of exemplary INHBE siRNA compounds in cell-
based hTLR7, hTLR8, and hTLR9 reporter assays.

| | EC₅₀ | | | CC₅₀ | | | |
|---|---|---|---|---|---|---|---|
| Compound ID | hTLR7 | hTLR8 | hTLR9 | hTLR7 | hTLR8 | hTLR9 | Unit |
| 100647 | >100 | >100 | >100 | >100 | >100 | >100 | nM |
| 100635 | >100 | >100 | >100 | >100 | >100 | >100 | nM |
| 100638 | >100 | >100 | >100 | >100 | >100 | >100 | nM |
| 100639 | >100 | >100 | >100 | >100 | >100 | >100 | nM |
| 100642 | >100 | >100 | >100 | >100 | >100 | >100 | nM |
| 100643 | >100 | >100 | >100 | >100 | >100 | >100 | nM |
| 100645 | >100 | >100 | >100 | >100 | >100 | >100 | nM |
| R848 | 0.924 | 9.863 | / | >10 | >10 | / | μM |
| ODN 2006 | / | / | 80.79 | / | / | >1000 | nM |

### Example 8. RNA Sequence Transcriptome Analysis in Primary Human Hepatocytes

[0140] This example evaluates the RNA sequence transcriptome in primary human hepatocytes to assess potential off-target risk of exemplary siRNA compounds 100647, 100635, 100638, 100639, 100642, 100643, and 100645. Briefly, primary human hepatocyte (PHH) cells were collected after 48 hours of treatment with of the exemplary siRNA compounds for RNA extrations, library construction, and sequencing.

[0141] FIG. 8 shows the results of the RNA sequence transcriptome analysis in primary human hepatocytes treated with exemplary siRNA compounds. The data are presented as a volcano plot of differentially expresses genes (DEGs) among different groups, and show that INHBE is significantly down-regulated in all groups. Of all exemplary siRNA compounds tested, Compound 100639 returned the cleanest RNAseq result.

### Example 9. Non-GLP Mini Toxicology Study of Select siRNAs in In Vivo Mouse Model

[0142] Exemplary siRNA compounds 100635, 100642, and 100643 were evaluated via a non-GLP mini toxicology study in mice. Briefly, 7 week old male C57BL/6J mice (5 per group) were subcutaneously injected with a single 50 mg/kg dose of one of the 100635, 100642, and 100643 siRNA compounds (i.e., at day 0).

[0143] Blood was collected on day 0 (pre-dosing) and day 7. Tissues (liver and kidney) were collected on day 7 after termination.

[0144] Urine and blood samples harvested on day 0 (pre-dosing) were handled as follows. Plasma was snap frozen on snap frozen on dry ice upon collection, stored at −80 deg transferred for biochemistry analysis. Urine was stored at 4 degrees or −80 degree Celsius until transferred for biochemistry analysis.

[0145] Urine, blood, liver and kidney samples harvested on day 7 were handled as follows. Plasma: snap frozen on dry ice upon collection, stored at −80 deg transferred for biochemistry analysis Plasma was stored on ice until transferred for coagulation assays

[0146] Liver and kidney were fixed in 4% paraformaldehyde until transferred for histopathology evaluation.

[0147] FIG. 9 and Table 12 shows the results of injecting C57BL/6J mice with a single 50 mg/kg dose of one of 100635, 100642, or 100643 siRNA compounds.

[0148] FIG. 9 shows the results of the mice biochemical tests over 7 days post dosing. Compared with the results of PBS control group, no significant difference was observed for the mean plasma concentration of alanine aminotransferase (ALT), aspartate aminotransferase (AST), triglycerides (TRIG), low-density lipoprotein cholesterol (LDL-C), high-density lipoprotein cholesterol (HDL-C), creatinine (CREZ), cholesterol (CHOL), and lactate dehydrogenase (LDH) of mice in the test compound groups. The mean plasma UREA concentration of mice in the 100635 group was significantly higher than that of mice in the PBS group on day 7. Compared with the results of PBS control group, no significant difference was observed for the mean urine concentration of urea (UREA), urine micro total protein (UP), and creatinine (CREZ) of mice in the test compound groups.

[0149] Table 12 shows the results of the liver and kidney pathology study over 7 days post dosing. The study results indicate no significant lesions (damage) in the experimental subjects. Observed changes in the PBS group may have be due to background lesions.

TABLE 12
Liver and kidney pathology study results.

| Group | Liver Pathological Diagnosis | Kidney Pathological Diagnosis |
|---|---|---|
| Group 1 | Inflammatory cells were occasionally seen | No significant lesion was found |
| PBS | around the blood vessels and liver margins | |
| 5 mL/kg, | Few inflammatory cell aggregation focis | No significant lesion was found |
| SC | along with hepatocellular degeneration | |
| | were found | |
| | Inflammatory cells were occasionally seen | No significant lesion was found |
| | in the portal area | |
| | Inflammatory cells were occasionally seen | No significant lesion was found |
| | No significant lesion was found | No significant lesion was found |
| Group 2 | No significant lesion was found | No significant lesion was found |
| Compound | No significant lesion was found | Interstitial cell hyperplasia were |
| 100635 | | occasionally seen |
| 50 mpk, | No significant lesion was found | No significant lesion was found |
| SC | No significant lesion was found | No significant lesion was found |
| | No significant lesion was found | No significant lesion was found |
| Group 3 | No significant lesion was found | No significant lesion was found |
| Compound | No significant lesion was found | No significant lesion was found |
| 100642 | No significant lesion was found | No significant lesion was found |
| 50 mpk, | Inflammatory cell aggregation focis were | No significant lesion was found |
| SC | occasionally seen in the portal area | |
| | Inflammatory cells were occasionally seen | No significant lesion was found |
| Group 4 | No significant lesion was found | No significant lesion was found |
| Compound | Inflammatory cell aggregation focis were | Basophilic tubule cells were |
| 100643 | occasionally seen in the portal area | occasionally seen |
| 50 mpk, | No significant lesion was found | No significant lesion was found |
| SC | No significant lesion was found | No significant lesion was found |
| | No significant lesion was found | Scattered inflammatory cells were |
| | | occasionally seen |

[0150] In conclusion, no significant differences were detected in the biochemical indexes tested, and no significant lesions or damage was observed by liver and kidney pathological diagnosis. Therefore, in general, the single dose subcutaneous administration of the test compounds 100635, 100642, or 100643 in mice was considered to be safe and no obvious toxicity was observed in this non-GLP study.

[0151] While preferred embodiments of the present invention have been shown and described herein, it will be obvious to those skilled in the art that such embodiments are provided by way of example only. Numerous variations, changes, and substitutions will now occur to those skilled in the art without departing from the invention. It should be understood that various alternatives to the embodiments described herein may be employed. It is intended that the following claims define the scope of the invention and that methods and structures within the scope of these claims and their equivalents be covered thereby.

SEQUENCE LISTING

| SEQ | | |
|---|---|---|
| ID | | |
| NO: | Description | Sequence |
| 1 | Sense 5′-3′ | GGGUCAAGCACAGCUAUCCAU |
| 2 | Sense 5′-3′ | CACAGCUAUCCAUCAGAUGAU |
| 3 | Sense 5′-3′ | CAGCUAUCCAUCAGAUGAUCU |
| 4 | Sense 5′-3′ | AGCUAUCCAUCAGAUGAUCUA |
| 5 | Sense 5′-3′ | CUAUCCAUCAGAUGAUCUACU |
| 6 | Sense 5′-3′ | UAUCCAUCAGAUGAUCUACUU |
| 7 | Sense 5′-3′ | CCAUCAGAUGAUCUACUUUCA |
| 8 | Sense 5′-3′ | CUACUUUCAGCCUUCCUGAGU |
| 9 | Sense 5′-3′ | GACAAUAGAAGACAGGUGGCU |
| 10 | Sense 5′-3′ | GCAGUGGUGUCUGCUGUCACU |
| 11 | Sense 5′-3′ | CUCAUUGGCCCCCAGCAAUCA |
| 12 | Sense 5′-3′ | CUCCUGUGGGGGCUCCAAACU |
| 13 | Sense 5′-3′ | CUGGAGCUAGCCAAGCAGCAA |
| 14 | Sense 5′-3′ | UGGAGCUAGCCAAGCAGCAAA |
| 15 | Sense 5′-3′ | GGAGCUAGCCAAGCAGCAAAU |
| 16 | Sense 5′-3′ | GAGCUAGCCAAGCAGCAAAUC |
| 17 | Sense 5′-3′ | AGCUAGCCAAGCAGCAAAUCC |
| 18 | Sense 5′-3′ | GCUAGCCAAGCAGCAAAUCCU |
| 19 | Sense 5′-3′ | UAGCCAAGCAGCAAAUCCUGG |
| 20 | Sense 5′-3′ | GCCAAGCAGCAAAUCCUGGAU |
| 21 | Sense 5′-3′ | UGACCAGUCGUCCCAGAAUAA |
| 22 | Sense 5′-3′ | ACCAGUCGUCCCAGAAUAACU |
| 23 | Sense 5′-3′ | CGUCCCAGAAUAACUCAUCCU |
| 24 | Sense 5′-3′ | CGCUGACCAGAGCCCUCCGGA |
| 25 | Sense 5′-3′ | GCUGACCAGAGCCCUCCGGAG |
| 26 | Sense 5′-3′ | CUGACCAGAGCCCUCCGGAGA |
| 27 | Sense 5′-3′ | UGACCAGAGCCCUCCGGAGAC |
| 28 | Sense 5′-3′ | GACCAGAGCCCUCCGGAGACU |
| 29 | Sense 5′-3′ | ACCAGAGCCCUCCGGAGACUA |
| 30 | Sense 5′-3′ | AGGGAAUGGGGAGGAGGUCAU |
| 31 | Sense 5′-3′ | AGGAGGUCAUCAGCUUUGCUA |
| 32 | Sense 5′-3′ | GAGGUCAUCAGCUUUGCUACU |
| 33 | Sense 5′-3′ | GCUUUGCUACUGUCACAGACU |
| 34 | Sense 5′-3′ | CGGUCCCACCACCUGUACCAU |
| 35 | Sense 5′-3′ | GGUCCCACCACCUGUACCAUG |
| 36 | Sense 5′-3′ | GUCCCACCACCUGUACCAUGC |
| 37 | Sense 5′-3′ | UCCCACCACCUGUACCAUGCC |
| 38 | Sense 5′-3′ | CCCACCACCUGUACCAUGCCC |
| 39 | Sense 5′-3′ | CCACCACCUGUACCAUGCCCG |
| 40 | Sense 5′-3′ | CACCACCUGUACCAUGCCCGC |
| 41 | Sense 5′-3′ | ACCACCUGUACCAUGCCCGCC |
| 42 | Sense 5′-3′ | CCACCUGUACCAUGCCCGCCU |
| 43 | Sense 5′-3′ | CACCUGUACCAUGCCCGCCUG |
| 44 | Sense 5′-3′ | CCACCCUUCCUGGCACUCUUU |
| 45 | Sense 5′-3′ | CCCUUCCUGGCACUCUUUGCU |
| 46 | Sense 5′-3′ | UGGCACUCUUUGCUUGAGGAU |
| 47 | Sense 5′-3′ | GCACUCUUUGCUUGAGGAUCU |
| 48 | Sense 5′-3′ | CACUCUUUGCUUGAGGAUCUU |
| 49 | Sense 5′-3′ | CUAGUGGCUUGAGGGGUGAGA |
| 50 | Sense 5′-3′ | GGCUUGAGGGGUGAGAAGUCU |
| 51 | Sense 5′-3′ | GAAGUCUGGUGUCCUGAAACU |
| 52 | Sense 5′-3′ | UGGUGUCCUGAAACUGCAACU |
| 53 | Sense 5′-3′ | GGUGUCCUGAAACUGCAACUA |
| 54 | Sense 5′-3′ | CAGCCCUUCCUAGAGCUUAAG |
| 55 | Sense 5′-3′ | GCCCUUCCUAGAGCUUAAGAU |
| 56 | Sense 5′-3′ | GAGCUUAAGAUCCGAGCCAAU |
| 57 | Sense 5′-3′ | CCAUUACGUAGACUUCCAGGA |
| 58 | Sense 5′-3′ | CCCGAGGGGUACCAGCUGAAU |
| 59 | Sense 5′-3′ | CGAGGGGUACCAGCUGAAUUA |
| 60 | Sense 5′-3′ | GGUACCAGCUGAAUUACUGCA |
| 61 | Sense 5′-3′ | GUACCAGCUGAAUUACUGCAG |
| 62 | Sense 5′-3′ | UACCAGCUGAAUUACUGCAGU |
| 63 | Sense 5′-3′ | ACCAGCUGAAUUACUGCAGUG |
| 64 | Sense 5′-3′ | CCAGCUGAAUUACUGCAGUGG |
| 65 | Sense 5′-3′ | AGCUGAAUUACUGCAGUGGGC |
| 66 | Sense 5′-3′ | GCUGAAUUACUGCAGUGGGCA |
| 67 | Sense 5′-3′ | CUGAAUUACUGCAGUGGGCAG |
| 68 | Sense 5′-3′ | AUUACUGCAGUGGGCAGUGCC |
| 69 | Sense 5′-3′ | GGCAUUGCUGCCUCUUUCCAU |
| 70 | Sense 5′-3′ | GCAUUGCUGCCUCUUUCCAUU |
| 71 | Sense 5′-3′ | CUCUUUCCAUUCUGCCGUCUU |
| 72 | Sense 5′-3′ | UCAGCCUCCUCAAAGCCAACA |
| 73 | Sense 5′-3′ | CAGCCUCCUCAAAGCCAACAA |
| 74 | Sense 5′-3′ | UCCUCAAAGCCAACAAUCCUU |
| 75 | Sense 5′-3′ | UCUCUCCUCUACCUGGAUCAU |
| 76 | Sense 5′-3′ | UCUCCUCUACCUGGAUCAUAA |
| 77 | Sense 5′-3′ | CUCCUCUACCUGGAUCAUAAU |
| 78 | Sense 5′-3′ | UACCUGGAUCAUAAUGGCAAU |
| 79 | Sense 5′-3′ | CCUGGAUCAUAAUGGCAAUGU |
| 80 | Sense 5′-3′ | AUCAUAAUGGCAAUGUGGUCA |
| 81 | Sense 5′-3′ | UCAUAAUGGCAAUGUGGUCAA |
| 82 | Sense 5′-3′ | CAUAAUGGCAAUGUGGUCAAG |
| 83 | Sense 5′-3′ | AUAAUGGCAAUGUGGUCAAGA |
| 84 | Sense 5′-3′ | UAAUGGCAAUGUGGUCAAGAC |
| 85 | Sense 5′-3′ | AAUGGCAAUGUGGUCAAGACG |
| 86 | Sense 5′-3′ | CAAUGUGGUCAAGACGGAUGU |
| 87 | Sense 5′-3′ | CAAGACGGAUGUGCCAGAUAU |
| 88 | Sense 5′-3′ | GAGGCCUGUGGCUGCAGCUAG |
| 89 | Sense 5′-3′ | AGGCCUGUGGCUGCAGCUAGC |
| 90 | Sense 5′-3′ | GGCCUGUGGCUGCAGCUAGCA |
| 91 | Sense 5′-3′ | GCCUGUGGCUGCAGCUAGCAA |
| 92 | Sense 5′-3′ | CCUGUGGCUGCAGCUAGCAAG |
| 93 | Sense 5′-3′ | GCUUUGGAGUGAAGAGACCAA |
| 94 | Sense 5′-3′ | CAACCACCUGGCAAUAUGACU |
| 95 | Sense 5′-3′ | ACCACCUGGCAAUAUGACUCA |
| 96 | Sense 5′-3′ | CACCUGGCAAUAUGACUCACU |
| 97 | Sense 5′-3′ | GGACCCAAAUGGGCACUUUCU |
| 98 | Sense 5′-3′ | CCCAAAUGGGCACUUUCUUGU |
| 99 | Sense 5′-3′ | CAAAUGGGCACUUUCUUGUCU |
| 100 | Sense 5′-3′ | GGCACUUUCUUGUCUGAGACU |
| 101 | Sense 5′-3′ | CACUUUCUUGUCUGAGACUCU |
| 102 | Sense 5′-3′ | CUUGUCUGAGACUCUGGCUUA |
| 103 | Sense 5′-3′ | AGGGAAGGCAGAGAAAAAUUA |
| 104 | Sense 5′-3′ | GGGAAGGCAGAGAAAAAUUAC |
| 105 | Sense 5′-3′ | AGCCUCUCCCAAGAUGAGAAA |
| 106 | Sense 5′-3′ | CCUCUCCCAAGAUGAGAAAGU |
| 107 | Sense 5′-3′ | CUCCCAAGAUGAGAAAGUCCU |
| 108 | Sense 5′-3′ | GGGGAGGAGGAAGCAGAUAGA |
| 109 | Sense 5′-3′ | GGGAGGAGGAAGCAGAUAGAU |
| 110 | Sense 5′-3′ | CAGAAACAGGAGUCAGGAAAA |
| 111 | Sense 5′-3′ | GCACUAAGCCUAAGAAGUUCC |
| 112 | Sense 5′-3′ | CCCACUGGGAGACAAGCAUUU |
| 113 | Sense 5′-3′ | CCACUGGGAGACAAGCAUUUA |
| 114 | Sense 5′-3′ | ACUGGGAGACAAGCAUUUAUA |
| 115 | Sense 5′-3′ | UGGGAGACAAGCAUUUAUACU |
| 116 | Sense 5′-3′ | GGGAGACAAGCAUUUAUACUU |
| 117 | Sense 5′-3′ | GACAAGCAUUUAUACUUUCUU |
| 118 | Sense 5′-3′ | GAGCCACCGCGCCUGGCUUAU |
| 119 | Sense 5′-3′ | CCACCGCGCCUGGCUUAUACU |
| 120 | Sense 5′-3′ | ACCGCGCCUGGCUUAUACUUU |
| 121 | Sense 5′-3′ | CGCGCCUGGCUUAUACUUUCU |
| 122 | Sense 5′-3′ | GCGCCUGGCUUAUACUUUCUU |
| 123 | Sense 5′-3′ | CGCCUGGCUUAUACUUUCUUA |
| 124 | Sense 5′-3′ | GCCUGGCUUAUACUUUCUUAA |
| 125 | Sense 5′-3′ | CCUGGCUUAUACUUUCUUAAU |
| 126 | Sense 5′-3′ | UGGCUUAUACUUUCUUAAUAA |
| 127 | Sense 5′-3′ | GGCUUAUACUUUCUUAAUAAA |
| 128 | Sense 5′-3′ | CUUAUACUUUCUUAAUAAAAA |
| 129 | Sense 5′-3′ | AGGGGUGUCCACAAAGUCAAA |
| 130 | Sense 5′-3′ | GGGGUGUCCACAAAGUCAAAG |
| 131 | Sense 5′-3′ | UCAUAAUAAUACUAACAUGUU |
| 132 | Sense 5′-3′ | ACUAACAUGUUAUUUGCCUUU |
| 133 | Sense 5′-3′ | GUUAUUUGCCUUUUGAAUUCU |
| 134 | Sense 5′-3′ | UGCCUUUUGAAUUCUCAUUAU |
| 135 | Sense 5′-3′ | GCCUUUUGAAUUCUCAUUAUC |
| 136 | Sense 5′-3′ | CCUUUUGAAUUCUCAUUAUCU |
| 137 | Sense 5′-3′ | CUUUUGAAUUCUCAUUAUCUU |
| 138 | Sense 5′-3′ | UGAAUUCUCAUUAUCUUAAAA |
| 139 | Sense 5′-3′ | GAAUUCUCAUUAUCUUAAAAU |
| 140 | Sense 5′-3′ | CCGUGUGACAUGUGAUUACAU |
| 141 | Sense 5′-3′ | UGUGACAUGUGAUUACAUCAU |
| 142 | Sense 5′-3′ | UGACAUGUGAUUACAUCAUCU |
| 143 | Sense 5′-3′ | GACAUGUGAUUACAUCAUCUU |
| 144 | Sense 5′-3′ | UCUUUCUGACAUCAUUGUUAA |
| 145 | Sense 5′-3′ | CUUUCUGACAUCAUUGUUAAU |
| 146 | Sense 5′-3′ | GACAUCAUUGUUAAUGGAAUG |
| 147 | Sense 5′-3′ | GUUAAUGGAAUGUGUGCUUGU |
| 147 | Antisense 5′-3′ | AUGGAUAGCUGUGCUUGACCCUC |
| 148 | Antisense 5′-3′ | AUCAUCUGAUGGAUAGCUGUGCU |
| 149 | Antisense 5′-3′ | AGAUCAUCUGAUGGAUAGCUGUG |
| 150 | Antisense 5′-3′ | UAGAUCAUCUGAUGGAUAGCUGU |
| 151 | Antisense 5′-3′ | AGUAGAUCAUCUGAUGGAUAGCU |
| 152 | Antisense 5′-3′ | AAGUAGAUCAUCUGAUGGAUAGC |
| 153 | Antisense 5′-3′ | UGAAAGUAGAUCAUCUGAUGGAU |
| 154 | Antisense 5′-3′ | ACUCAGGAAGGCUGAAAGUAGAU |
| 155 | Antisense 5′-3′ | AGCCACCUGUCUUCUAUUGUCUG |
| 156 | Antisense 5′-3′ | AGUGACAGCAGACACCACUGCCA |
| 157 | Antisense 5′-3′ | UGAUUGCUGGGGGCCAAUGAGGG |
| 158 | Antisense 5′-3′ | AGUUUGGAGCCCCCACAGGAGGG |
| 159 | Antisense 5′-3′ | UUGCUGCUUGGCUAGCUCCAGCA |
| 160 | Antisense 5′-3′ | UUUGCUGCUUGGCUAGCUCCAGC |
| 161 | Antisense 5′-3′ | AUUUGCUGCUUGGCUAGCUCCAG |
| 162 | Antisense 5′-3′ | GAUUUGCUGCUUGGCUAGCUCCA |
| 163 | Antisense 5′-3′ | GGAUUUGCUGCUUGGCUAGCUCC |
| 164 | Antisense 5′-3′ | AGGAUUUGCUGCUUGGCUAGCUC |
| 165 | Antisense 5′-3′ | CCAGGAUUUGCUGCUUGGCUAGC |
| 166 | Antisense 5′-3′ | AUCCAGGAUUUGCUGCUUGGCUA |
| 167 | Antisense 5′-3′ | UUAUUCUGGGACGACUGGUCAGG |
| 168 | Antisense 5′-3′ | AGUUAUUCUGGGACGACUGGUCA |
| 169 | Antisense 5′-3′ | AGGAUGAGUUAUUCUGGGACGAC |
| 170 | Antisense 5′-3′ | UCCGGAGGGCUCUGGUCAGCGCU |
| 171 | Antisense 5′-3′ | CUCCGGAGGGCUCUGGUCAGCGC |
| 172 | Antisense 5′-3′ | UCUCCGGAGGGCUCUGGUCAGCG |
| 173 | Antisense 5′-3′ | GUCUCCGGAGGGCUCUGGUCAGC |
| 174 | Antisense 5′-3′ | AGUCUCCGGAGGGCUCUGGUCAG |
| 175 | Antisense 5′-3′ | UAGUCUCCGGAGGGCUCUGGUCA |
| 176 | Antisense 5′-3′ | AUGACCUCCUCCCCAUUCCCUGG |
| 177 | Antisense 5′-3′ | UAGCAAAGCUGAUGACCUCCUCC |
| 178 | Antisense 5′-3′ | AGUAGCAAAGCUGAUGACCUCCU |
| 179 | Antisense 5′-3′ | AGUCUGUGACAGUAGCAAAGCUG |
| 180 | Antisense 5′-3′ | AUGGUACAGGUGGUGGGACCGAG |
| 181 | Antisense 5′-3′ | CAUGGUACAGGUGGUGGGACCGA |
| 182 | Antisense 5′-3′ | GCAUGGUACAGGUGGUGGGACCG |
| 183 | Antisense 5′-3′ | GGCAUGGUACAGGUGGUGGGACC |
| 184 | Antisense 5′-3′ | GGGCAUGGUACAGGUGGUGGGAC |
| 185 | Antisense 5′-3′ | CGGGCAUGGUACAGGUGGUGGGA |
| 186 | Antisense 5′-3′ | GCGGGCAUGGUACAGGUGGUGGG |
| 187 | Antisense 5′-3′ | GGCGGGCAUGGUACAGGUGGUGG |
| 188 | Antisense 5′-3′ | AGGCGGGCAUGGUACAGGUGGUG |
| 189 | Antisense 5′-3′ | CAGGCGGGCAUGGUACAGGUGGU |
| 190 | Antisense 5′-3′ | AAAGAGUGCCAGGAAGGGUGGGG |
| 191 | Antisense 5′-3′ | AGCAAAGAGUGCCAGGAAGGGUG |
| 192 | Antisense 5′-3′ | AUCCUCAAGCAAAGAGUGCCAGG |
| 193 | Antisense 5′-3′ | AGAUCCUCAAGCAAAGAGUGCCA |
| 194 | Antisense 5′-3′ | AAGAUCCUCAAGCAAAGAGUGCC |
| 195 | Antisense 5′-3′ | UCUCACCCCUCAAGCCACUAGAG |
| 196 | Antisense 5′-3′ | AGACUUCUCACCCCUCAAGCCAC |
| 197 | Antisense 5′-3′ | AGUUUCAGGACACCAGACUUCUC |
| 198 | Antisense 5′-3′ | AGUUGCAGUUUCAGGACACCAGA |
| 199 | Antisense 5′-3′ | UAGUUGCAGUUUCAGGACACCAG |
| 200 | Antisense 5′-3′ | CUUAAGCUCUAGGAAGGGCUGCU |
| 201 | Antisense 5′-3′ | AUCUUAAGCUCUAGGAAGGGCUG |
| 202 | Antisense 5′-3′ | AUUGGCUCGGAUCUUAAGCUCUA |
| 203 | Antisense 5′-3′ | UCCUGGAAGUCUACGUAAUGGUC |
| 204 | Antisense 5′-3′ | AUUCAGCUGGUACCCCUCGGGCU |
| 205 | Antisense 5′-3′ | UAAUUCAGCUGGUACCCCUCGGG |
| 206 | Antisense 5′-3′ | UGCAGUAAUUCAGCUGGUACCCC |
| 207 | Antisense 5′-3′ | CUGCAGUAAUUCAGCUGGUACCC |
| 208 | Antisense 5′-3′ | ACUGCAGUAAUUCAGCUGGUACC |
| 209 | Antisense 5′-3′ | CACUGCAGUAAUUCAGCUGGUAC |
| 210 | Antisense 5′-3′ | CCACUGCAGUAAUUCAGCUGGUA |
| 211 | Antisense 5′-3′ | GCCCACUGCAGUAAUUCAGCUGG |
| 212 | Antisense 5′-3′ | UGCCCACUGCAGUAAUUCAGCUG |
| 213 | Antisense 5′-3′ | CUGCCCACUGCAGUAAUUCAGCU |
| 214 | Antisense 5′-3′ | GGCACUGCCCACUGCAGUAAUUC |
| 215 | Antisense 5′-3′ | AUGGAAAGAGGCAGCAAUGCCUG |
| 216 | Antisense 5′-3′ | AAUGGAAAGAGGCAGCAAUGCCU |
| 217 | Antisense 5′-3′ | AAGACGGCAGAAUGGAAAGAGGC |
| 218 | Antisense 5′-3′ | UGUUGGCUUUGAGGAGGCUGAAG |
| 219 | Antisense 5′-3′ | UUGUUGGCUUUGAGGAGGCUGAA |
| 220 | Antisense 5′-3′ | AAGGAUUGUUGGCUUUGAGGAGG |
| 221 | Antisense 5′-3′ | AUGAUCCAGGUAGAGGAGAGAGA |
| 222 | Antisense 5′-3′ | UUAUGAUCCAGGUAGAGGAGAGA |
| 223 | Antisense 5′-3′ | AUUAUGAUCCAGGUAGAGGAGAG |
| 224 | Antisense 5′-3′ | AUUGCCAUUAUGAUCCAGGUAGA |
| 225 | Antisense 5′-3′ | ACAUUGCCAUUAUGAUCCAGGUA |
| 226 | Antisense 5′-3′ | UGACCACAUUGCCAUUAUGAUCC |
| 227 | Antisense 5′-3′ | UUGACCACAUUGCCAUUAUGAUC |
| 228 | Antisense 5′-3′ | CUUGACCACAUUGCCAUUAUGAU |
| 229 | Antisense 5′-3′ | UCUUGACCACAUUGCCAUUAUGA |
| 230 | Antisense 5′-3′ | GUCUUGACCACAUUGCCAUUAUG |
| 231 | Antisense 5′-3′ | CGUCUUGACCACAUUGCCAUUAU |
| 232 | Antisense 5′-3′ | ACAUCCGUCUUGACCACAUUGCC |
| 233 | Antisense 5′-3′ | AUAUCUGGCACAUCCGUCUUGAC |
| 234 | Antisense 5′-3′ | CUAGCUGCAGCCACAGGCCUCCA |
| 235 | Antisense 5′-3′ | GCUAGCUGCAGCCACAGGCCUCC |
| 236 | Antisense 5′-3′ | UGCUAGCUGCAGCCACAGGCCUC |
| 237 | Antisense 5′-3′ | UUGCUAGCUGCAGCCACAGGCCU |
| 238 | Antisense 5′-3′ | CUUGCUAGCUGCAGCCACAGGCC |
| 239 | Antisense 5′-3′ | UUGGUCUCUUCACUCCAAAGCCC |
| 240 | Antisense 5′-3′ | AGUCAUAUUGCCAGGUGGUUGUU |
| 241 | Antisense 5′-3′ | UGAGUCAUAUUGCCAGGUGGUUG |
| 242 | Antisense 5′-3′ | AGUGAGUCAUAUUGCCAGGUGGU |
| 243 | Antisense 5′-3′ | AGAAAGUGCCCAUUUGGGUCCCA |
| 244 | Antisense 5′-3′ | ACAAGAAAGUGCCCAUUUGGGUC |
| 245 | Antisense 5′-3′ | AGACAAGAAAGUGCCCAUUUGGG |
| 246 | Antisense 5′-3′ | AGUCUCAGACAAGAAAGUGCCCA |
| 247 | Antisense 5′-3′ | AGAGUCUCAGACAAGAAAGUGCC |
| 248 | Antisense 5′-3′ | UAAGCCAGAGUCUCAGACAAGAA |
| 249 | Antisense 5′-3′ | UAAUUUUUCUCUGCCUUCCCUCC |
| 250 | Antisense 5′-3′ | GUAAUUUUUCUCUGCCUUCCCUC |
| 251 | Antisense 5′-3′ | UUUCUCAUCUUGGGAGAGGCUAA |
| 252 | Antisense 5′-3′ | ACUUUCUCAUCUUGGGAGAGGCU |
| 253 | Antisense 5′-3′ | AGGACUUUCUCAUCUUGGGAGAG |
| 254 | Antisense 5′-3′ | UCUAUCUGCUUCCUCCUCCCCUC |
| 255 | Antisense 5′-3′ | AUCUAUCUGCUUCCUCCUCCCCU |
| 256 | Antisense 5′-3′ | UUUUCCUGACUCCUGUUUCUGGG |
| 257 | Antisense 5′-3′ | GGAACUUCUUAGGCUUAGUGCCU |
| 258 | Antisense 5′-3′ | AAAUGCUUGUCUCCCAGUGGGUC |
| 259 | Antisense 5′-3′ | UAAAUGCUUGUCUCCCAGUGGGU |
| 260 | Antisense 5′-3′ | UAUAAAUGCUUGUCUCCCAGUGG |
| 261 | Antisense 5′-3′ | AGUAUAAAUGCUUGUCUCCCAGU |
| 262 | Antisense 5′-3′ | AAGUAUAAAUGCUUGUCUCCCAG |
| 263 | Antisense 5′-3′ | AAGAAAGUAUAAAUGCUUGUCUC |
| 264 | Antisense 5′-3′ | AUAAGCCAGGCGCGGUGGCUCAC |
| 265 | Antisense 5′-3′ | AGUAUAAGCCAGGCGCGGUGGCU |
| 266 | Antisense 5′-3′ | AAAGUAUAAGCCAGGCGCGGUGG |
| 267 | Antisense 5′-3′ | AGAAAGUAUAAGCCAGGCGCGGU |
| 268 | Antisense 5′-3′ | AAGAAAGUAUAAGCCAGGCGCGG |
| 269 | Antisense 5′-3′ | UAAGAAAGUAUAAGCCAGGCGCG |
| 270 | Antisense 5′-3′ | UUAAGAAAGUAUAAGCCAGGCGC |
| 271 | Antisense 5′-3′ | AUUAAGAAAGUAUAAGCCAGGCG |
| 272 | Antisense 5′-3′ | UUAUUAAGAAAGUAUAAGCCAGG |
| 273 | Antisense 5′-3′ | UUUAUUAAGAAAGUAUAAGCCAG |
| 274 | Antisense 5′-3′ | UUUUUAUUAAGAAAGUAUAAGCC |
| 275 | Antisense 5′-3′ | UUUGACUUUGUGGACACCCCUGA |
| 276 | Antisense 5′-3′ | CUUUGACUUUGUGGACACCCCUG |
| 277 | Antisense 5′-3′ | AACAUGUUAGUAUUAUUAUGAAA |
| 278 | Antisense 5′-3′ | AAAGGCAAAUAACAUGUUAGUAU |
| 279 | Antisense 5′-3′ | AGAAUUCAAAAGGCAAAUAACAU |
| 280 | Antisense 5′-3′ | AUAAUGAGAAUUCAAAAGGCAAA |
| 281 | Antisense 5′-3′ | GAUAAUGAGAAUUCAAAAGGCAA |
| 282 | Antisense 5′-3′ | AGAUAAUGAGAAUUCAAAAGGCA |
| 283 | Antisense 5′-3′ | AAGAUAAUGAGAAUUCAAAAGGC |
| 284 | Antisense 5′-3′ | UUUUAAGAUAAUGAGAAUUCAAA |
| 285 | Antisense 5′-3′ | AUUUUAAGAUAAUGAGAAUUCAA |
| 286 | Antisense 5′-3′ | AUGUAAUCACAUGUCACACGGCC |
| 287 | Antisense 5′-3′ | AUGAUGUAAUCACAUGUCACACG |
| 288 | Antisense 5′-3′ | AGAUGAUGUAAUCACAUGUCACA |
| 289 | Antisense 5′-3′ | AAGAUGAUGUAAUCACAUGUCAC |
| 290 | Antisense 5′-3′ | UUAACAAUGAUGUCAGAAAGAUG |
| 291 | Antisense 5′-3′ | AUUAACAAUGAUGUCAGAAAGAU |
| 292 | Antisense 5′-3′ | CAUUCCAUUAACAAUGAUGUCAG |
| 293 | Antisense 5′-3′ | ACAAGCACACAUUCCAUUAACAA |
| 294 | Sense 5′-3′ | g*g*gucaAgCACagcuauccau |
| | (modified) | |
| 295 | Sense 5′-3′ | c*a*cagcUaUCCaucagaugau |
| | (modified) | |
| 296 | Sense 5′-3′ | c*a*gcuaUcCAUcagaugaucu |
| | (modified) | |
| 297 | Sense 5′-3′ | a*g*cuauCcAUCagaugaucua |
| | (modified) | |
| 298 | Sense 5′-3′ | c*u*auccAuCAGaugaucuacu |
| | (modified) | |
| 299 | Sense 5′-3′ | u*a*uccaUcAGAugaucuacuu |
| | (modified) | |
| 300 | Sense 5′-3′ | c*c*aucaGaUGAucuacuuuca |
| | (modified) | |
| 301 | Sense 5′-3′ | c*u*acuuUcAGCcuuccugagu |
| | (modified) | |
| 302 | Sense 5′-3′ | g*a*caauAgAAGacagguggcu |
| | (modified) | |
| 303 | Sense 5′-3′ | g*c*agugGuGUCugcugucacu |
| | (modified) | |
| 304 | Sense 5′-3′ | c*u*cauuGgCCCccagcaauca |
| | (modified) | |
| 305 | Sense 5′-3′ | c*u*ccugUgGGGgcuccaaacu |
| | (modified) | |
| 306 | Sense 5′-3′ | c*u*ggagCuAGCcaagcagcaa |
| | (modified) | |
| 307 | Sense 5′-3′ | u*g*gagcUaGCCaagcagcaaa |
| | (modified) | |
| 308 | Sense 5′-3′ | g*g*agcuAgCCAagcagcaaau |
| | (modified) | |
| 309 | Sense 5′-3′ | g*a*gcuaGcCAAgcagcaaauc |
| | (modified) | |
| 310 | Sense 5′-3′ | a*g*cuagCcAAGcagcaaaucc |
| | (modified) | |
| 311 | Sense 5′-3′ | g*c*uagcCaAGCagcaaauccu |
| | (modified) | |
| 312 | Sense 5′-3′ | u*a*gccaAgCAGcaaauccugg |
| | (modified) | |
| 313 | Sense 5′-3′ | g*c*caagCaGCAaauccuggau |
| | (modified) | |
| 314 | Sense 5′-3′ | u*g*accaGuCGUcccagaauaa |
| | (modified) | |
| 315 | Sense 5′-3′ | a*c*caguCgUCCcagaauaacu |
| | (modified) | |
| 316 | Sense 5′-3′ | c*g*ucccAgAAUaacucauccu |
| | (modified) | |
| 317 | Sense 5′-3′ | c*g*cugaCcAGAgcccuccgga |
| | (modified) | |
| 318 | Sense 5′-3′ | g*c*ugacCaGAGcccuccggag |
| | (modified) | |
| 319 | Sense 5′-3′ | c*u*gaccAgAGCccuccggaga |
| | (modified) | |
| 320 | Sense 5′-3′ | u*g*accaGaGCCcuccggagac |
| | (modified) | |
| 321 | Sense 5′-3′ | g*a*ccagAgCCCuccggagacu |
| | (modified) | |
| 322 | Sense 5′-3′ | a*c*cagaGcCCUccggagacua |
| | (modified) | |
| 323 | Sense 5′-3′ | a*g*ggaaUgGGGaggaggucau |
| | (modified) | |
| 324 | Sense 5′-3′ | a*g*gaggUcAUCagcuuugcua |
| | (modified) | |
| 325 | Sense 5′-3′ | g*a*ggucAuCAGcuuugcuacu |
| | (modified) | |
| 326 | Sense 5′-3′ | g*c*uuugCuACUgucacagacu |
| | (modified) | |
| 327 | Sense 5′-3′ | c*g*guccCaCCAccuguaccau |
| | (modified) | |
| 328 | Sense 5′-3′ | g*g*ucccAcCACcuguaccaug |
| | (modified) | |
| 329 | Sense 5′-3′ | g*u*cccaCcACCuguaccaugc |
| | (modified) | |
| 330 | Sense 5′-3′ | u*c*ccacCaCCUguaccaugcc |
| | (modified) | |
| 331 | Sense 5′-3′ | c*c*caccAcCUGuaccaugccc |
| | (modified) | |
| 332 | Sense 5′-3′ | c*c*accaCcUGUaccaugcccg |
| | (modified) | |
| 333 | Sense 5′-3′ | c*a*ccacCuGUAccaugcccgc |
| | (modified) | |
| 334 | Sense 5′-3′ | a*c*caccUgUACcaugcccgcc |
| | (modified) | |
| 335 | Sense 5′-3′ | c*c*accuGuACCaugcccgccu |
| | (modified) | |
| 336 | Sense 5′-3′ | c*a*ccugUaCCAugcccgccug |
| | (modified) | |
| 337 | Sense 5′-3′ | c*c*acccUuCCUggcacucuuu |
| | (modified) | |
| 338 | Sense 5′-3′ | c*c*cuucCuGGCacucuuugcu |
| | (modified) | |
| 339 | Sense 5′-3′ | u*g*gcacUcUUUgcuugaggau |
| | (modified) | |
| 340 | Sense 5′-3′ | g*c*acucUuUGCuugaggaucu |
| | (modified) | |
| 341 | Sense 5′-3′ | c*a*cucuUuGCUugaggaucuu |
| | (modified) | |
| 342 | Sense 5′-3′ | c*u*agugGcUUGaggggugaga |
| | (modified) | |
| 343 | Sense 5′-3′ | g*g*cuugAgGGGugagaagucu |
| | (modified) | |
| 344 | Sense 5′-3′ | g*a*agucUgGUGuccugaaacu |
| | (modified) | |
| 345 | Sense 5′-3′ | u*g*guguCcUGAaacugcaacu |
| | (modified) | |
| 346 | Sense 5′-3′ | g*g*ugucCuGAAacugcaacua |
| | (modified) | |
| 347 | Sense 5′-3′ | c*a*gcccUuCCUagagcuuaag |
| | (modified) | |
| 348 | Sense 5′-3′ | g*c*ccuuCcUAGagcuuaagau |
| | (modified) | |
| 349 | Sense 5′-3′ | g*a*gcuuAaGAUccgagccaau |
| | (modified) | |
| 350 | Sense 5′-3′ | c*c*auuaCgUAGacuuccagga |
| | (modified) | |
| 351 | Sense 5′-3′ | c*c*cgagGgGUAccagcugaau |
| | (modified) | |
| 352 | Sense 5′-3′ | c*g*agggGuACCagcugaauua |
| | (modified) | |
| 353 | Sense 5′-3′ | g*g*uaccAgCUGaauuacugca |
| | (modified) | |
| 354 | Sense 5′-3′ | g*u*accaGcUGAauuacugcag |
| | (modified) | |
| 355 | Sense 5′-3′ | u*a*ccagCuGAAuuacugcagu |
| | (modified) | |
| 356 | Sense 5′-3′ | a*c*cagcUgAAUuacugcagug |
| | (modified) | |
| 357 | Sense 5′-3′ | c*c*agcuGaAUUacugcagugg |
| | (modified) | |
| 358 | Sense 5′-3′ | a*g*cugaAuUACugcagugggc |
| | (modified) | |
| 359 | Sense 5′-3′ | g*c*ugaaUuACUgcagugggca |
| | (modified) | |
| 360 | Sense 5′-3′ | c*u*gaauUaCUGcagugggcag |
| | (modified) | |
| 361 | Sense 5′-3′ | a*u*uacuGcAGUgggcagugcc |
| | (modified) | |
| 362 | Sense 5′-3′ | g*g*cauuGcUGCcucuuuccau |
| | (modified) | |
| 363 | Sense 5′-3′ | g*c*auugCuGCCucuuuccauu |
| | (modified) | |
| 364 | Sense 5′-3′ | c*u*cuuuCcAUUcugccgucuu |
| | (modified) | |
| 365 | Sense 5′-3′ | u*c*agccUcCUCaaagccaaca |
| | (modified) | |
| 366 | Sense 5′-3′ | c*a*gccuCcUCAaagccaacaa |
| | (modified) | |
| 367 | Sense 5′-3′ | u*c*cucaAaGCCaacaauccuu |
| | (modified) | |
| 368 | Sense 5′-3′ | u*c*ucucCuCUAccuggaucau |
| | (modified) | |
| 369 | Sense 5′-3′ | u*c*uccuCuACCuggaucauaa |
| | (modified) | |
| 370 | Sense 5′-3′ | c*u*ccucUaCCUggaucauaau |
| | (modified) | |
| 371 | Sense 5′-3′ | u*a*ccugGaUCAuaauggcaau |
| | (modified) | |
| 372 | Sense 5′-3′ | c*c*uggaUcAUAauggcaaugu |
| | (modified) | |
| 373 | Sense 5′-3′ | a*u*cauaAuGGCaaugugguca |
| | (modified) | |
| 374 | Sense 5′-3′ | u*c*auaaUgGCAauguggucaa |
| | (modified) | |
| 375 | Sense 5′-3′ | c*a*uaauGgCAAuguggucaag |
| | (modified) | |
| 376 | Sense 5′-3′ | a*u*aaugGcAAUguggucaaga |
| | (modified) | |
| 377 | Sense 5′-3′ | u*a*auggCaAUGuggucaagac |
| | (modified) | |
| 378 | Sense 5′-3′ | a*a*uggcAaUGUggucaagacg |
| | (modified) | |
| 379 | Sense 5′-3′ | c*a*auguGgUCAagacggaugu |
| | (modified) | |
| 380 | Sense 5′-3′ | c*a*agacGgAUGugccagauau |
| | (modified) | |
| 381 | Sense 5′-3′ | g*a*ggccUgUGGcugcagcuag |
| | (modified) | |
| 382 | Sense 5′-3′ | a*g*gccuGuGGCugcagcuagc |
| | (modified) | |
| 383 | Sense 5′-3′ | g*g*ccugUgGCUgcagcuagca |
| | (modified) | |
| 384 | Sense 5′-3′ | g*c*cuguGgCUGcagcuagcaa |
| | (modified) | |
| 385 | Sense 5′-3′ | c*c*ugugGcUGCagcuagcaag |
| | (modified) | |
| 386 | Sense 5′-3′ | g*c*uuugGaGUGaagagaccaa |
| | (modified) | |
| 387 | Sense 5′-3′ | c*a*accaCcUGGcaauaugacu |
| | (modified) | |
| 388 | Sense 5′-3′ | a*c*caccUgGCAauaugacuca |
| | (modified) | |
| 389 | Sense 5′-3′ | c*a*ccugGcAAUaugacucacu |
| | (modified) | |
| 390 | Sense 5′-3′ | g*g*acccAaAUGggcacuuucu |
| | (modified) | |
| 391 | Sense 5′-3′ | c*c*caaaUgGGCacuuucuugu |
| | (modified) | |
| 392 | Sense 5′-3′ | c*a*aaugGgCACuuucuugucu |
| | (modified) | |
| 393 | Sense 5′-3′ | g*g*cacuUuCUUgucugagacu |
| | (modified) | |
| 394 | Sense 5′-3′ | c*a*cuuuCuUGUcugagacucu |
| | (modified) | |
| 395 | Sense 5′-3′ | c*u*ugucUgAGAcucuggcuua |
| | (modified) | |
| 396 | Sense 5′-3′ | a*g*ggaaGgCAGagaaaaauua |
| | (modified) | |
| 397 | Sense 5′-3′ | g*g*gaagGcAGAgaaaaauuac |
| | (modified) | |
| 398 | Sense 5′-3′ | a*g*ccucUcCCAagaugagaaa |
| | (modified) | |
| 399 | Sense 5′-3′ | c*c*ucucCcAAGaugagaaagu |
| | (modified) | |
| 400 | Sense 5′-3′ | c*u*cccaAgAUGagaaaguccu |
| | (modified) | |
| 401 | Sense 5′-3′ | g*g*ggagGaGGAagcagauaga |
| | (modified) | |
| 402 | Sense 5′-3′ | g*g*gaggAgGAAgcagauagau |
| | (modified) | |
| 403 | Sense 5′-3′ | c*a*gaaaCaGGAgucaggaaaa |
| | (modified) | |
| 404 | Sense 5′-3′ | g*c*acuaAgCCUaagaaguucc |
| | (modified) | |
| 405 | Sense 5′-3′ | c*c*cacuGgGAGacaagcauuu |
| | (modified) | |
| 406 | Sense 5′-3′ | c*c*acugGgAGAcaagcauuua |
| | (modified) | |
| 407 | Sense 5′-3′ | a*c*ugggAgACAagcauuuaua |
| | (modified) | |
| 408 | Sense 5′-3′ | u*g*ggagAcAAGcauuuauacu |
| | (modified) | |
| 409 | Sense 5′-3′ | g*g*gagaCaAGCauuuauacuu |
| | (modified) | |
| 410 | Sense 5′-3′ | g*a*caagCaUUUauacuuucuu |
| | (modified) | |
| 411 | Sense 5′-3′ | g*a*gccaCcGCGccuggcuuau |
| | (modified) | |
| 412 | Sense 5′-3′ | c*c*accgCgCCUggcuuauacu |
| | (modified) | |
| 413 | Sense 5′-3′ | a*c*cgcgCcUGGcuuauacuuu |
| | (modified) | |
| 414 | Sense 5′-3′ | c*g*cgccUgGCUuauacuuucu |
| | (modified) | |
| 415 | Sense 5′-3′ | g*c*gccuGgCUUauacuuucuu |
| | (modified) | |
| 416 | Sense 5′-3′ | c*g*ccugGcUUAuacuuucuua |
| | (modified) | |
| 417 | Sense 5′-3′ | g*c*cuggCuUAUacuuucuuaa |
| | (modified) | |
| 418 | Sense 5′-3′ | c*c*uggcUuAUAcuuucuuaau |
| | (modified) | |
| 419 | Sense 5′-3′ | u*g*gcuuAuACUuucuuaauaa |
| | (modified) | |
| 420 | Sense 5′-3′ | g*g*cuuaUaCUUucuuaauaaa |
| | (modified) | |
| 421 | Sense 5′-3′ | c*u*uauaCuUUCuuaauaaaaa |
| | (modified) | |
| 422 | Sense 5′-3′ | a*g*ggguGuCCAcaaagucaaa |
| | (modified) | |
| 423 | Sense 5′-3′ | g*g*ggugUcCACaaagucaaag |
| | (modified) | |
| 424 | Sense 5′-3′ | u*c*auaaUaAUAcuaacauguu |
| | (modified) | |
| 425 | Sense 5′-3′ | a*c*uaacAuGUUauuugccuuu |
| | (modified) | |
| 426 | Sense 5′-3′ | g*u*uauuUgCCUuuugaauucu |
| | (modified) | |
| 427 | Sense 5′-3′ | u*g*ccuuUuGAAuucucauuau |
| | (modified) | |
| 428 | Sense 5′-3′ | g*c*cuuuUgAAUucucauuauc |
| | (modified) | |
| 429 | Sense 5′-3′ | c*c*uuuuGaAUUcucauuaucu |
| | (modified) | |
| 430 | Sense 5′-3′ | c*u*uuugAaUUCucauuaucuu |
| | (modified) | |
| 431 | Sense 5′-3′ | u*g*aauuCuCAUuaucuuaaaa |
| | (modified) | |
| 432 | Sense 5′-3′ | g*a*auucUcAUUaucuuaaaau |
| | (modified) | |
| 433 | Sense 5′-3′ | c*c*guguGaCAUgugauuacau |
| | (modified) | |
| 434 | Sense 5′-3′ | u*g*ugacAuGUGauuacaucau |
| | (modified) | |
| 435 | Sense 5′-3′ | u*g*acauGuGAUuacaucaucu |
| | (modified) | |
| 436 | Sense 5′-3′ | g*a*caugUgAUUacaucaucuu |
| | (modified) | |
| 437 | Sense 5′-3′ | u*c*uuucUgACAucauuguuaa |
| | (modified) | |
| 438 | Sense 5′-3′ | c*u*uucuGaCAUcauuguuaau |
| | (modified) | |
| 439 | Sense 5′-3′ | g*a*caucAuUGUuaauggaaug |
| | (modified) | |
| 440 | Sense 5′-3′ | g*u*uaauGgAAUgugugcuugu |
| | (modified) | |
| 441 | Antisense 5′-3′ | a*U*ggaUaGCugugCuUgaccc*u*c |
| | (modified) | |
| 442 | Antisense 5′-3′ | a*U*cauCuGAuggaUaGcugug*c*u |
| | (modified) | |
| 443 | Antisense 5′-3′ | a*G*aucAuCUgaugGaUagcug*u*g |
| | (modified) | |
| 444 | Antisense 5′-3′ | u*A*gauCaUCugauGgAuagcu*g*u |
| | (modified) | |
| 445 | Antisense 5′-3′ | a*G*uagAuCAucugAuGgauag*c*u |
| | (modified) | |
| 446 | Antisense 5′-3′ | a*A*guaGaUCaucuGaUggaua*g*c |
| | (modified) | |
| 447 | Antisense 5′-3′ | u*G*aaaGuAGaucaUcUgaugg*a*u |
| | (modified) | |
| 448 | Antisense 5′-3′ | a*C*ucaGgAAggcuGaAaguag*a*u |
| | (modified) | |
| 449 | Antisense 5′-3′ | a*G*ccaCcUGucuuCuAuuguc*u*g |
| | (modified) | |
| 450 | Antisense 5′-3′ | a*G*ugaCaGCagacAcCacugc*c*a |
| | (modified) | |
| 451 | Antisense 5′-3′ | u*G*auuGcUGggggCcAaugag*g*g |
| | (modified) | |
| 452 | Antisense 5′-3′ | a*G*uuuGgAGccccCaCaggag*g*g |
| | (modified) | |
| 453 | Antisense 5′-3′ | u*U*gcuGcUUggcuAgCuccag*c*a |
| | (modified) | |
| 454 | Antisense 5′-3′ | u*U*ugcUgCUuggcUaGcucca*g*c |
| | (modified) | |
| 455 | Antisense 5′-3′ | a*U*uugCuGCuuggCuAgcucc*a*g |
| | (modified) | |
| 456 | Antisense 5′-3′ | g*A*uuuGcUGcuugGcUagcuc*c*a |
| | (modified) | |
| 457 | Antisense 5′-3′ | g*G*auuUgCUgcuuGgCuagcu*c*c |
| | (modified) | |
| 458 | Antisense 5′-3′ | a*G*gauUuGCugcuUgGcuagc*u*c |
| | (modified) | |
| 459 | Antisense 5′-3′ | c*C*aggAuUUgcugCuUggcua*g*c |
| | (modified) | |
| 460 | Antisense 5′-3′ | a*U*ccaGgAUuugcUgCuuggc*u*a |
| | (modified) | |
| 461 | Antisense 5′-3′ | u*U*auuCuGGgacgAcUgguca*g*g |
| | (modified) | |
| 462 | Antisense 5′-3′ | a*G*uuaUuCUgggaCgAcuggu*c*a |
| | (modified) | |
| 463 | Antisense 5′-3′ | a*G*gauGaGUuauuCuGggacg*a*c |
| | (modified) | |
| 464 | Antisense 5′-3′ | u*C*cggAgGGcucuGgUcagcg*c*u |
| | (modified) | |
| 465 | Antisense 5′-3′ | c*U*ccgGaGGgcucUgGucagc*g*c |
| | (modified) | |
| 466 | Antisense 5′-3′ | u*C*uccGgAGggcuCuGgucag*c*g |
| | (modified) | |
| 467 | Antisense 5′-3′ | g*U*cucCgGAgggcUcUgguca*g*c |
| | (modified) | |
| 468 | Antisense 5′-3′ | a*G*ucuCcGGagggCuCugguc*a*g |
| | (modified) | |
| 469 | Antisense 5′-3′ | u*A*gucUcCGgaggGcUcuggu*c*a |
| | (modified) | |
| 470 | Antisense 5′-3′ | a*U*gacCuCCucccCaUucccu*g*g |
| | (modified) | |
| 471 | Antisense 5′-3′ | u*A*gcaAaGCugauGaCcuccu*c*c |
| | (modified) | |
| 472 | Antisense 5′-3′ | a*G*uagCaAAgcugAuGaccuc*c*u |
| | (modified) | |
| 473 | Antisense 5′-3′ | a*G*ucuGuGAcaguAgCaaagc*u*g |
| | (modified) | |
| 474 | Antisense 5′-3′ | a*U*gguAcAGguggUgGgaccg*a*g |
| | (modified) | |
| 475 | Antisense 5′-3′ | c*A*uggUaCAggugGuGggacc*g*a |
| | (modified) | |
| 476 | Antisense 5′-3′ | g*C*augGuACagguGgUgggac*c*g |
| | (modified) | |
| 477 | Antisense 5′-3′ | g*G*cauGgUAcaggUgGuggga*c*c |
| | (modified) | |
| 478 | Antisense 5′-3′ | g*G*gcaUgGUacagGuGguggg*a*c |
| | (modified) | |
| 479 | Antisense 5′-3′ | c*G*ggcAuGGuacaGgUggugg*g*a |
| | (modified) | |
| 480 | Antisense 5′-3′ | g*C*gggCaUGguacAgGuggug*g*g |
| | (modified) | |
| 481 | Antisense 5′-3′ | g*G*cggGcAUgguaCaGguggu*g*g |
| | (modified) | |
| 482 | Antisense 5′-3′ | a*G*gcgGgCAugguAcAggugg*u*g |
| | (modified) | |
| 483 | Antisense 5′-3′ | c*A*ggcGgGCauggUaCaggug*g*u |
| | (modified) | |
| 484 | Antisense 5′-3′ | a*A*agaGuGCcaggAaGggugg*g*g |
| | (modified) | |
| 485 | Antisense 5′-3′ | a*G*caaAgAGugccAgGaaggg*u*g |
| | (modified) | |
| 486 | Antisense 5′-3′ | a*U*ccuCaAGcaaaGaGugcca*g*g |
| | (modified) | |
| 487 | Antisense 5′-3′ | a*G*aucCuCAagcaAaGagugc*c*a |
| | (modified) | |
| 488 | Antisense 5′-3′ | a*A*gauCcUCaagcAaAgagug*c*c |
| | (modified) | |
| 489 | Antisense 5′-3′ | u*C*ucaCcCCucaaGcCacuag*a*g |
| | (modified) | |
| 490 | Antisense 5′-3′ | a*G*acuUcUCacccCuCaagcc*a*c |
| | (modified) | |
| 491 | Antisense 5′-3′ | a*G*uuuCaGGacacCaGacuuc*u*c |
| | (modified) | |
| 492 | Antisense 5′-3′ | a*G*uugCaGUuucaGgAcacca*g*a |
| | (modified) | |
| 493 | Antisense 5′-3′ | u*A*guuGcAGuuucAgGacacc*a*g |
| | (modified) | |
| 494 | Antisense 5′-3′ | C*U*uaaGcUCuaggAaGggcug*c*u |
| | (modified) | |
| 495 | Antisense 5′-3′ | a*U*cuuAaGCucuaGgAagggc*u*g |
| | (modified) | |
| 496 | Antisense 5′-3′ | a*U*uggCuCGgaucUuAagcuc*u*a |
| | (modified) | |
| 497 | Antisense 5′-3′ | u*C*cugGaAGucuaCgUaaugg*u*c |
| | (modified) | |
| 498 | Antisense 5′-3′ | a*U*ucaGcUGguacCcCucggg*c*u |
| | (modified) | |
| 499 | Antisense 5′-3′ | u*A*auuCaGCugguAcCccucg*g*g |
| | (modified) | |
| 500 | Antisense 5′-3′ | u*G*cagUaAUucagCuGguacc*c*c |
| | (modified) | |
| 501 | Antisense 5′-3′ | C*U*gcaGuAAuucaGcUgguac*c*c |
| | (modified) | |
| 502 | Antisense 5′-3′ | a*C*ugcAgUAauucAgCuggua*c*c |
| | (modified) | |
| 503 | Antisense 5′-3′ | C*A*cugCaGUaauuCaGcuggu*a*c |
| | (modified) | |
| 504 | Antisense 5′-3′ | c*C*acuGcAGuaauUcAgcugg*u*a |
| | (modified) | |
| 505 | Antisense 5′-3′ | g*C*ccaCuGCaguaAuUcagcu*g*g |
| | (modified) | |
| 506 | Antisense 5′-3′ | u*G*cccAcUGcaguAaUucagc*u*g |
| | (modified) | |
| 507 | Antisense 5′-3′ | c*U*gccCaCUgcagUaAuucag*c*u |
| | (modified) | |
| 508 | Antisense 5′-3′ | g*G*cacUgCCcacuGcAguaau*u*c |
| | (modified) | |
| 509 | Antisense 5′-3′ | a*U*ggaAaGAggcaGcAaugcc*u*g |
| | (modified) | |
| 510 | Antisense 5′-3′ | a*A*uggAaAGaggcAgCaaugc*c*u |
| | (modified) | |
| 511 | Antisense 5′-3′ | a*A*gacGgCAgaauGgAaagag*g*c |
| | (modified) | |
| 512 | Antisense 5′-3′ | u*G*uugGcUUugagGaGgcuga*a*g |
| | (modified) | |
| 513 | Antisense 5′-3′ | u*U*guuGgCUuugaGgAggcug*a*a |
| | (modified) | |
| 514 | Antisense 5′-3′ | a*A*ggaUuGUuggcUuUgagga*g*g |
| | (modified) | |
| 515 | Antisense 5′-3′ | a*U*gauCcAGguagAgGagaga*g*a |
| | (modified) | |
| 516 | Antisense 5′-3′ | u*U*augAuCCagguAgAggaga*g*a |
| | (modified) | |
| 517 | Antisense 5′-3′ | a*U*uauGaUCcaggUaGaggag*a*g |
| | (modified) | |
| 518 | Antisense 5′-3′ | a*U*ugcCaUUaugaUcCaggua*g*a |
| | (modified) | |
| 519 | Antisense 5′-3′ | a*C*auuGcCAuuauGaUccagg*u*a |
| | (modified) | |
| 520 | Antisense 5′-3′ | u*G*accAcAUugccAuUaugau*c*c |
| | (modified) | |
| 521 | Antisense 5′-3′ | u*U*gacCaCAuugcCaUuauga*u*c |
| | (modified) | |
| 522 | Antisense 5′-3′ | c*U*ugaCcACauugCcAuuaug*a*u |
| | (modified) | |
| 523 | Antisense 5′-3′ | u*C*uugAcCAcauuGcCauuau*g*a |
| | (modified) | |
| 524 | Antisense 5′-3′ | g*U*cuuGaCCacauUgCcauua*u*g |
| | (modified) | |
| 525 | Antisense 5′-3′ | c*G*ucuUgACcacaUuGccauu*a*u |
| | (modified) | |
| 526 | Antisense 5′-3′ | a*C*aucCgUCuugaCcAcauug*c*c |
| | (modified) | |
| 527 | Antisense 5′-3′ | a*U*aucUgGCacauCcGucuug*a*c |
| | (modified) | |
| 528 | Antisense 5′-3′ | c*U*agcUgCAgccaCaGgccuc*c*a |
| | (modified) | |
| 529 | Antisense 5′-3′ | g*C*uagCuGCagccAcAggccu*c*c |
| | (modified) | |
| 530 | Antisense 5′-3′ | u*G*cuaGcUGcagcCaCaggcc*u*c |
| | (modified) | |
| 531 | Antisense 5′-3′ | u*U*gcuAgCUgcagCcAcaggc*c*u |
| | (modified) | |
| 532 | Antisense 5′-3′ | c*U*ugcUaGCugcaGcCacagg*c*c |
| | (modified) | |
| 533 | Antisense 5′-3′ | u*U*gguCuCUucacUcCaaagc*c*c |
| | (modified) | |
| 534 | Antisense 5′-3′ | a*G*ucaUaUUgccaGgUgguug*u*u |
| | (modified) | |
| 535 | Antisense 5′-3′ | u*G*aguCaUAuugcCaGguggu*u*g |
| | (modified) | |
| 536 | Antisense 5′-3′ | a*G*ugaGuCAuauuGcCaggug*g*u |
| | (modified) | |
| 537 | Antisense 5′-3′ | a*G*aaaGuGCccauUuGggucc*c*a |
| | (modified) | |
| 538 | Antisense 5′-3′ | a*C*aagAaAGugccCaUuuggg*u*c |
| | (modified) | |
| 539 | Antisense 5′-3′ | a*G*acaAgAAagugCcCauuug*g*g |
| | (modified) | |
| 540 | Antisense 5′-3′ | a*G*ucuCaGAcaagAaAgugcc*c*a |
| | (modified) | |
| 541 | Antisense 5′-3′ | a*G*aguCuCAgacaAgAaagug*c*c |
| | (modified) | |
| 542 | Antisense 5′-3′ | u*A*agcCaGAgucuCaGacaag*a*a |
| | (modified) | |
| 543 | Antisense 5′-3′ | u*A*auuUuUCucugCcUucccu*c*c |
| | (modified) | |
| 544 | Antisense 5′-3′ | g*U*aauUuUUcucuGcCuuccc*u*c |
| | (modified) | |
| 545 | Antisense 5′-3′ | u*U*ucuCaUCuuggGaGaggcu*a*a |
| | (modified) | |
| 546 | Antisense 5′-3′ | a*C*uuuCuCAucuuGgGagagg*c*u |
| | (modified) | |
| 547 | Antisense 5′-3′ | a*G*gacUuUCucauCuUgggag*a*g |
| | (modified) | |
| 548 | Antisense 5′-3′ | u*C*uauCuGCuuccUcCucccc*u*c |
| | (modified) | |
| 549 | Antisense 5′-3′ | a*U*cuaUcUGcuucCuCcuccc*c*u |
| | (modified) | |
| 550 | Antisense 5′-3′ | u*U*uucCuGAcuccUgUuucug*g*g |
| | (modified) | |
| 551 | Antisense 5′-3′ | g*G*aacUuCUuaggCuUagugc*c*u |
| | (modified) | |
| 552 | Antisense 5′-3′ | a*A*augCuUGucucCcAguggg*u*c |
| | (modified) | |
| 553 | Antisense 5′-3′ | u*A*aauGcUUgucuCcCagugg*g*u |
| | (modified) | |
| 554 | Antisense 5′-3′ | u*A*uaaAuGCuuguCuCccagu*g*g |
| | (modified) | |
| 555 | Antisense 5′-3′ | a*G*uauAaAUgcuuGuCuccca*g*u |
| | (modified) | |
| 556 | Antisense 5′-3′ | a*A*guaUaAAugcuUgUcuccc*a*g |
| | (modified) | |
| 557 | Antisense 5′-3′ | a*A*gaaAgUAuaaaUgCuuguc*u*c |
| | (modified) | |
| 558 | Antisense 5′-3′ | a*U*aagCcAGgcgcGgUggcuc*a*c |
| | (modified) | |
| 559 | Antisense 5′-3′ | a*G*uauAaGCcaggCgCggugg*c*u |
| | (modified) | |
| 560 | Antisense 5′-3′ | a*A*aguAuAAgccaGgCgcggu*g*g |
| | (modified) | |
| 561 | Antisense 5′-3′ | a*G*aaaGuAUaagcCaGgcgcg*g*u |
| | (modified) | |
| 562 | Antisense 5′-3′ | a*A*gaaAgUAuaagCcAggcgc*g*g |
| | (modified) | |
| 563 | Antisense 5′-3′ | u*A*agaAaGUauaaGcCaggcg*c*g |
| | (modified) | |
| 564 | Antisense 5′-3′ | u*U*aagAaAGuauaAgCcaggc*g*c |
| | (modified) | |
| 565 | Antisense 5′-3′ | a*U*uaaGaAAguauAaGccagg*c*g |
| | (modified) | |
| 566 | Antisense 5′-3′ | u*U*auuAaGAaaguAuAagcca*g*g |
| | (modified) | |
| 567 | Antisense 5′-3′ | u*U*uauUaAGaaagUaUaagcc*a*g |
| | (modified) | |
| 568 | Antisense 5′-3′ | u*U*uuuAuUAagaaAgUauaag*c*c |
| | (modified) | |
| 569 | Antisense 5′-3′ | u*U*ugaCuUUguggAcAccccu*g*a |
| | (modified) | |
| 570 | Antisense 5′-3′ | c*U*uugAcUUugugGaCacccc*u*g |
| | (modified) | |
| 571 | Antisense 5′-3′ | a*A*cauGuUAguauUaUuauga*a*a |
| | (modified) | |
| 572 | Antisense 5′-3′ | a*A*aggCaAAuaacAuGuuagu*a*u |
| | (modified) | |
| 573 | Antisense 5′-3′ | a*G*aauUcAAaaggCaAauaac*a*u |
| | (modified) | |
| 574 | Antisense 5′-3′ | a*U*aauGaGAauucAaAaggca*a*a |
| | (modified) | |
| 575 | Antisense 5′-3′ | g*A*uaaUgAGaauuCaAaaggc*a*a |
| | (modified) | |
| 576 | Antisense 5′-3′ | a*G*auaAuGAgaauUcAaaagg*c*a |
| | (modified) | |
| 577 | Antisense 5′-3′ | a*A*gauAaUGagaaUuCaaaag*g*c |
| | (modified) | |
| 578 | Antisense 5′-3′ | u*U*uuaAgAUaaugAgAauuca*a*a |
| | (modified) | |
| 579 | Antisense 5′-3′ | a*U*uuuAaGAuaauGaGaauuc*a*a |
| | (modified) | |
| 580 | Antisense 5′-3′ | a*U*guaAuCAcaugUcAcacgg*c*c |
| | (modified) | |
| 581 | Antisense 5′-3′ | a*U*gauGuAAucacAuGucaca*c*g |
| | (modified) | |
| 582 | Antisense 5′-3′ | a*G*augAuGUaaucAcAuguca*c*a |
| | (modified) | |
| 583 | Antisense 5′-3′ | a*A*gauGaUGuaauCaCauguc*a*c |
| | (modified) | |
| 584 | Antisense 5′-3′ | u*U*aacAaUGauguCaGaaaga*u*g |
| | (modified) | |
| 585 | Antisense 5′-3′ | a*U*uaaCaAUgaugUcAgaaag*a*u |
| | (modified) | |
| 586 | Antisense 5′-3′ | C*A*uucCaUUaacaAuGauguc*a*g |
| | (modified) | |
| 587 | Antisense 5′-3′ | a*C*aagCaCAcauuCcAuuaac*a*a |
| | (modified) | |
| 588 | >NM_031479.5 | AGTAGCCAGACATGAGCTGTGAGGGTC |
| | Homo sapiens | AAGCACAGCTATCCATCAGATGATCTA |
| | inhibin | CTTTCAGCCTTCCTGAGTCCCAGACAA |
| | subunit beta E | TAGAAGACAGGTGGCTGTACCCTTGGC |
| | (INHBE), mRNA | CAAGGGTAGGTGTGGCAGTGGTGTCTG |
| | | CTGTCACTGTGCCCTCATTGGCCCCCA |
| | | GCAATCAGACTCAACAGACGGAGCAAC |
| | | TGCCATCCGAGGCTCCTGAACCAGGGC |
| | | CATTCACCAGGAGCATGCGGCTCCCTG |
| | | ATGTCCAGCTCTGGCTGGTGCTGCTGT |
| | | GGGCACTGGTGCGAGCACAGGGGACAG |
| | | GGTCTGTGTGTCCCTCCTGTGGGGGCT |
| | | CCAAACTGGCACCCCAAGCAGAACGAG |
| | | CTCTGGTGCTGGAGCTAGCCAAGCAGC |
| | | AAATCCTGGATGGGTTGCACCTGACCA |
| | | GTCGTCCCAGAATAACTCATCCTCCAC |
| | | CCCAGGCAGCGCTGACCAGAGCCCTCC |
| | | GGAGACTACAGCCAGGGAGTGTGGCTC |
| | | CAGGGAATGGGGAGGAGGTCATCAGCT |
| | | TTGCTACTGTCACAGACTCCACTTCAG |
| | | CCTACAGCTCCCTGCTCACTTTTCACC |
| | | TGTCCACTCCTCGGTCCCACCACCTGT |
| | | ACCATGCCCGCCTGTGGCTGCACGTGC |
| | | TCCCCACCCTTCCTGGCACTCTTTGCT |
| | | TGAGGATCTTCCGATGGGGACCAAGGA |
| | | GGAGGCGCCAAGGGTCCCGCACTCTCC |
| | | TGGCTGAGCACCACATCACCAACCTGG |
| | | GCTGGCATACCTTAACTCTGCCCTCTA |
| | | GTGGCTTGAGGGGTGAGAAGTCTGGTG |
| | | TCCTGAAACTGCAACTAGACTGCAGAC |
| | | CCCTAGAAGGCAACAGCACAGTTACTG |
| | | GACAACCGAGGCGGCTCTTGGACACAG |
| | | CAGGACACCAGCAGCCCTTCCTAGAGC |
| | | TTAAGATCCGAGCCAATGAGCCTGGAG |
| | | CAGGCCGGGCCAGGAGGAGGACCCCCA |
| | | CCTGTGAGCCTGCGACCCCCTTATGTT |
| | | GCAGGCGAGACCATTACGTAGACTTCC |
| | | AGGAACTGGGATGGCGGGACTGGATAC |
| | | TGCAGCCCGAGGGGTACCAGCTGAATT |
| | | ACTGCAGTGGGCAGTGCCCTCCCCACC |
| | | TGGCTGGCAGCCCAGGCATTGCTGCCT |
| | | CTTTCCATTCTGCCGTCTTCAGCCTCC |
| | | TCAAAGCCAACAATCCTTGGCCTGCCA |
| | | GTACCTCCTGTTGTGTCCCTACTGCCC |
| | | GAAGGCCCCTCTCTCTCCTCTACCTGG |
| | | ATCATAATGGCAATGTGGTCAAGACGG |
| | | ATGTGCCAGATATGGTGGTGGAGGCCT |
| | | GTGGCTGCAGCTAGCAAGAGGACCTGG |
| | | GGCTTTGGAGTGAAGAGACCAAGATGA |
| | | AGTTTCCCAGGCACAGGGCATCTGTGA |
| | | CTGGAGGCATCAGATTCCTGATCCACA |
| | | CCCCAACCCAACAACCACCTGGCAATA |
| | | TGACTCACTTGACCCCTATGGGACCCA |
| | | AATGGGCACTTTCTTGTCTGAGACTCT |
| | | GGCTTATTCCAGGTTGGCTGATGTGTT |
| | | GGGAGATGGGTAAAGCGTTTCTTCTAA |
| | | AGGGGTCTACCCAGAAAGCATGATTTC |
| | | CTGCCCTAAGTCCTGTGAGAAGATGTC |
| | | AGGGACTAGGGAGGGAGGGAGGGAAGG |
| | | CAGAGAAAAATTACTTAGCCTCTCCCA |
| | | AGATGAGAAAGTCCTCAAGTGAGGGGA |
| | | GGAGGAAGCAGATAGATGGTCCAGCAG |
| | | GCTTGAAGCAGGGTAAGCAGGCTGGCC |
| | | CAGGGTAAGGGCTGTTGAGGTACCTTA |
| | | AGGGAAGGTCAAGAGGGAGATGGGCAA |
| | | GGCGCTGAGGGAGGATGCTTAGGGGAC |
| | | CCCCAGAAACAGGAGTCAGGAAAATGA |
| | | GGCACTAAGCCTAAGAAGTTCCCTGGT |
| | | TTTTCCCAGGGGACAGGACCCACTGGG |
| | | AGACAAGCATTTATACTTTCTTTCTTC |
| | | TTTTTTATTTTTTTGAGATCGAGTCTC |
| | | GCTCTGTCACCAGGCTGGAGTGCAGTG |
| | | ACACGATCTTGGCTCACTGCAACCTCC |
| | | GTCTCCTGGGTTCAAGTGATTCTTCTG |
| | | CCTCAGCCTCCCGAGCAGCTGGGATTA |
| | | CAGGCGCCCACTAATTTTTGTATTCTT |
| | | AGTAGAAACGAGGTTTCAACATGTTGG |
| | | CCAGGATGGTCTCAATCTCTTGACCTC |
| | | TTGATCCACCCGACTTGGCCTCCCGAA |
| | | GTGATGAGATTATAGGCGTGAGCCACC |
| | | GCGCCTGGCTTATACTTTCTTAATAAA |
| | | AAGGAGAAAGAAAATCAACAAATGTGA |
| | | GTCATAAAGAAGGGTTAGGGTGATGGT |
| | | CCAGAGCAACAGTTCTTCAAGTGTACT |
| | | CTGTAGGCTTCTGGGAGGTCCCTTTTC |
| | | AGGGGTGTCCACAAAGTCAAAGCTATT |
| | | TTCATAATAATACTAACATGTTATTTG |
| | | CCTTTTGAATTCTCATTATCTTAAAAT |
| | | TGTATTGTGGAGTTTTCCAGAGGCCGT |
| | | GTGACATGTGATTACATCATCTTTCTG |
| | | ACATCATTGTTAATGGAATGTGTGCTT |
| | | GTA |
| 589 | Sense 5′-3′ | ACUCUUUGCUUGAGGAUCUU |
| 590 | Sense 5′-3′ | ACUCUUUGCUUGAGGAUCUU |
| 591 | Sense 5′-3′ | ACAAGCAUUUAUACUUUCUU |
| 592 | Sense 5′-3′ | ACAAGCAUUUAUACUUUCUU |
| 593 | Sense 5′-3′ | GGCUUAUACUUUCUUAAUAA |
| 594 | Sense 5′-3′ | TGGCUUAUACUUUCUUAAUAAUU |
| 595 | Sense 5′-3′ | ACAAGCAUUUAUACUUUCUUU |
| 596 | Sense 5′-3′ | UGAAGAGACCAAGAUGAAGUU |
| 597 | Sense 5′-3′ | AGAGACCAAGAUGAAGUUUCC |
| 598 | Antisense 5′-3′ | AAGAUCCUCAAGCAAAGAGUGCC |
| 599 | Antisense 5′-3′ | AAGAUCCUCAAGCAAAGAGUGCC |
| 600 | Antisense 5′-3′ | AAGAAAGUAUAAAUGCUUGUCUC |
| 601 | Antisense 5′-3′ | AAGAAAGUAUAAAUGCUUGUCUC |
| 602 | Antisense 5′-3′ | UUAUUAAGAAAGUAUAAGCCAGG |
| 603 | Antisense 5′-3′ | UUAUUAAGAAAGUAUAAGCCAGG |
| 604 | Antisense 5′-3′ | UAAGAAAGUAUAAAUGCUUGUCU |
| 605 | Antisense 5′-3′ | UACUUCAUCUUGGUCUCUUCACU |
| 606 | Antisense 5′-3′ | UGAAACUUCAUCUUGGUCUCUUC |
| 607 | Sense 5′-3′ | a*c*ucuUuGCUuGaggaucuu |
| | (modified) | |
| 608 | Sense 5′-3′ | a*c*ucuUuGCUuGagga |
| | (modified) | (utU) cu (tmU) |
| 609 | Sense 5′-3′ | a*c*aagCaUUUaUacuuucuu |
| | (modified) | |
| 610 | Sense 5′-3′ | a*c*aagCaUUUaUacuuucu |
| | (modified) | (tmU) |
| 611 | Sense 5′-3′ | g*g*cuuAuACUuUcuuaauaa |
| | (modified) | |
| 612 | Sense 5′-3′ | invdT*g*g*cuuAuACUuUcuua |
| | (modified) | (utA) uaa*u* (tmU) |
| 613 | Sense 5′-3′ | a*c*aagcauUUAuacuuuuuu |
| | (modified) | |
| 614 | Sense 5′-3′ | u*g*aagagaCCAagaugaaguu |
| | (modified) | |
| 615 | Sense 5′-3′ | a*g*agaccaAGAugaaguuucc |
| | (modified) | |
| 616 | Antisense 5′-3′ | va*A*gAuCcUcaagcAaAgagug |
| | (modified) | *c*c |
| 617 | Antisense 5′-3′ | va*A*gAuCcUcaagcAaAgagug |
| | (modified) | *c*c |
| 618 | Antisense 5′-3′ | va*A*gaaAgUauaaaUgcuuguc |
| | (modified) | *u*c |
| 619 | Antisense 5′-3′ | va*A*gaaAgUauaaaUgcuuguc |
| | (modified) | *u*c |
| 620 | Antisense 5′-3′ | vu*U*aUuAaGaaaguAuAagcca |
| | (modified) | *g*g |
| 621 | Antisense 5′-3′ | vu*U*aUuAaGaaaguAuAagcca |
| | (modified) | *g*g |
| 622 | Antisense 5′-3′ | vu*A*aGaAaGuauaaAuGcuugucu |
| | (modified) | |
| 623 | Antisense 5′-3′ | vu*A*cUuCaUcuuggUcUcuucacu |
| | (modified) | |
| 624 | Antisense 5′-3′ | vu*G*aAaCuUcaucuuggucucuuc |
| | (modified) | |
| 625 | Sense 5′-3′ | invdT*a*c*ucuUuGCUuGaggauc |
| | (modified) | uu*u*u |
| 626 | Sense 5′-3′ | invdT*a*c*ucuUuGCUuGagga |
| | (modified) | (utU) cuu*u* (tmU) |
| 627 | Sense 5′-3′ | invdT*a*c*aagCaUUUaUacuuu |
| | (modified) | cuu*u*u |
| 628 | Sense 5′-3′ | invdT*a*c*aagCaUUUaUacuu |
| | (modified) | (tmU) cuu*u* (tmU) |
| 629 | Sense 5′-3′ | invdT*g*g*cuuAuACUuUcuuaa |
| | (modified) | uaa*u*u |
| 630 | Sense 5′-3′ | g*g*cuuAuACUuUcuuaauaa |
| | (modified) | |
| 631 | Sense 5′-3′ | C*u*gucaCaGACuccacuucau |
| | (modified) | (L96) |
| 632 | Antisense 5′-3′ | va*A*gAuCcUcaagcAaAgagug |
| | (modified) | *c*c |
| 633 | Antisense 5′-3′ | va*A*gAuCcUcaagcAaAgagug |
| | (modified) | *c*c |
| 634 | Antisense 5′-3′ | va*A*gaaAgUauaaaUgcuuguc |
| | (modified) | *u*c |
| 635 | Antisense 5′-3′ | va*A*gaaAgUauaaaUgcuuguc |
| | (modified) | *u*c |
| 636 | Antisense 5′-3′ | vu*U*aUuAaGaaaguAuAagcca |
| | (modified) | *g*g |
| 637 | Antisense 5′-3′ | vu*U*aUuAaGaaaguAuAag |
| | (modified) | (tmC) ca*g*g |
| 638 | Antisense 5′-3′ | A*U*gadAg (Tgn) |
| | (modified) | ggagucUgUgacag*u*a |
| 639 | Sense 5′-3′ | TACUCUUUGCUUGAGGAUCUUUU |
| 640 | Sense 5′-3′ | TACUCUUUGCUUGAGGAUCUUUU |
| 641 | Sense 5′-3′ | TACAAGCAUUUAUACUUUCUUUU |
| 642 | Sense 5′-3′ | TACAAGCAUUUAUACUUUCUUUU |
| 643 | Sense 5′-3′ | TGGCUUAUACUUUCUUAAUAAUU |
| 644 | Sense 5′-3′ | GGCUUAUACUUUCUUAAUAA |
| 645 | Sense 5′-3′ | CUGUCACAGACUCCACUUCAU |
| 646 | Antisense 5′-3′ | AAGAUCCUCAAGCAAAGAGUGCC |
| 647 | Antisense 5′-3′ | AAGAUCCUCAAGCAAAGAGUGCC |
| 648 | Antisense 5′-3′ | AAGAAAGUAUAAAUGCUUGUCUC |
| 649 | Antisense 5′-3′ | AAGAAAGUAUAAAUGCUUGUCUC |
| 650 | Antisense 5′-3′ | UUAUUAAGAAAGUAUAAGCCAGG |
| 651 | Antisense 5′-3′ | UUAUUAAGAAAGUAUAAGCCAGG |
| 652 | Antisense 5′-3′ | AUGAAGTGGAGUCUGUGACAGUA |
| 653 | Sense 5′-3′ | u*g*gcuuAuACUuucuuaauaa |
| | (modified) | |
| 654 | Sense 5′-3′ | u*u*ggagugAAGagaccaagau |
| | (modified) | |
| 655 | Sense 5′-3′ | u*c*uuuccaUUCugccgucuuc |
| | (modified) | |
| 656 | Sense 5′-3′ | g*g*agacaaGCAuuuauacuuu |
| | (modified) | |
| 657 | Sense 5′-3′ | g*a*gacaagCAUuuauacuuuc |
| | (modified) | |
| 658 | Sense 5′-3′ | a*g*agaccaAGAugaaguuucc |
| | (modified) | |
| 659 | Sense 5′-3′ | a*a*gaaguuCCCugguuuuucc |
| | (modified) | |
| 660 | Antisense 5′-3′ | u*U*auuAaGAaaguAuAagcca |
| | (modified) | *g*g |
| 661 | Antisense 5′-3′ | vu*U*cUuGgUcucuuCaCuccaaag |
| | (modified) | |
| 662 | Antisense 5′-3′ | vu*A*aGaCgGcagaaUgGaaagagg |
| | (modified) | |
| 663 | Antisense 5′-3′ | vu*A*aGuAuAaaugcUuGucuccca |
| | (modified) | |
| 664 | Antisense 5′-3′ | vu*A*aAgUaUaaaugCuUgucuccc |
| | (modified) | |
| 665 | Antisense 5′-3′ | vu*G*aAaCuUcaucuuggucucuuc |
| | (modified) | |
| 666 | Antisense 5′-3′ | vu*G*aAaAaCcagggAaCuucuuag |
| | (modified) | |
| 667 | Sense 5′-3′ | UGGCUUAUACUUUCUUAAUAA |
| 668 | Sense 5′-3′ | UUGGAGUGAAGAGACCAAGAU |
| 670 | Sense 5′-3′ | UCUUUCCAUUCUGCCGUCUUC |
| 671 | Sense 5′-3′ | GGAGACAAGCAUUUAUACUUU |
| 672 | Sense 5′-3′ | GAGACAAGCAUUUAUACUUUC |
| 673 | Sense 5′-3′ | AGAGACCAAGAUGAAGUUUCC |
| 674 | Sense 5′-3′ | AAGAAGUUCCCUGGUUUUUCC |
| 675 | Antisense 5′-3′ | UUAUUAAGAAAGUAUAAGCCAGG |
| 676 | Antisense 5′-3′ | UUCUUGGUCUCUUCACUCCAAAG |
| 677 | Antisense 5′-3′ | UAAGACGGCAGAAUGGAAAGAGG |
| 678 | Antisense 5′-3′ | UAAGUAUAAAUGCUUGUCUCCCA |
| 679 | Antisense 5′-3′ | UAAAGUAUAAAUGCUUGUCUCCC |
| 680 | Antisense 5′-3′ | UGAAACUUCAUCUUGGUCUCUUC |
| 681 | Antisense 5′-3′ | UGAAAAACCAGGGAACUUCUUAG |

### INCORPORATION BY REFERENCE

[0152] The entire disclosure of each of the patent and scientific documents referred to herein is incorporated by reference for all purposes.

### EQUIVALENTS

[0153] The disclosure can be embodied in other specific forms without departing from the essential characteristics thereof. The foregoing embodiments therefore are to be considered illustrative rather than limiting on the disclosure described herein. The scope of the disclosure is indicated by the appended claims rather than by the foregoing description, and all changes that come within the meaning and range of equivalency of the claims are intended to be embraced therein.

1-81. (canceled)

82. A double-stranded ribonucleic acid (dsRNA), wherein the dsRNA comprises a sense strand and an antisense strand each 18 to 25 nucleotides in length, wherein:
(a) the antisense strand comprises a nucleobase sequence of at least 15 contiguous nucleotides ofAAGACGGCAGAAUGGAAAGAGGC (SEQ ID NO: 217); and
(b) the sense strand comprises a nucleobase sequence of at least 15 contiguous nucleotides of CUCUUUCCAUUCUGCCGUCUU (SEQ ID NO: 71);
wherein at least one nucleotide of the dsRNA is a modified nucleotide selected from a 2′-O-methyl modified nucleotide or a 2′-fluoro modified nucleotide;
wherein at least one internucleoside linkage is a phosphorothioate linkage; and
wherein the dsRNA further comprises a ligand or targeting moiety that comprises at least one N-acetyl-galactosamine (GalNAc).

83. The dsRNA of claim 82, wherein the antisense strand comprises a nucleobase sequence of 17 contiguous nucleotides of AAGACGGCAGAAUGGAAAGAGGC (SEQ ID NO: 217).

84. The dsRNA of claim 82, wherein the sense strand comprises a nucleobase sequence of 17 contiguous nucleotides of CUCUUUCCAUUCUGCCGUCUU (SEQ ID NO: 71).

85. The dsRNA of claim 82, wherein the antisense strand is 23 nucleotides in length and the sense strand is 21 nucleotides in length.

86. The dsRNA of claim 82, wherein the antisense strand comprises a nucleobase sequence of 17 contiguous nucleotides of AAGACGGCAGAAUGGAAAGAGGC (SEQ ID NO: 217), the sense strand comprises a nucleobase sequence of 17 contiguous nucleotides of CUCUUUCCAUUCUGCCGUCUU (SEQ ID NO: 71), the antisense strand is 23 nucleotides in length, and the sense strand is 21 nucleotides in length.

87. The dsRNA of claim 82, wherein the antisense strand has a 3′ end nucleotide overhang compared to the sense strand.

88. The dsRNA of claim 82, wherein the antisense strand and the sense strand each comprise at least one modified nucleotide.

89. The dsRNA of claim 82, wherein the antisense strand and the sense strand each comprise at least one phosphorothioate linkage.

90. The dsRNA of claim 82, wherein the ligand or targeting moiety is conjugated to the 5′ end of the sense strand of the dsRNA.

91. The dsRNA of claim 86, wherein the ligand or targeting moiety is conjugated to the 5′ end of the sense strand of the dsRNA.

92. A double-stranded ribonucleic acid (dsRNA), wherein the dsRNA comprises an antisense strand of 23 nucleotides in length and a sense strand of 21 nucleotides in length, wherein:
(a) the antisense strand comprises a nucleobase sequence of 17 contiguous nucleotides ofAAGACGGCAGAAUGGAAAGAGGC (SEQ ID NO: 217); and
(b) the sense strand comprises a nucleobase sequence of 17 contiguous nucleotides of CUCUUUCCAUUCUGCCGUCUU (SEQ ID NO: 71);
wherein the antisense strand has a 3′ end nucleotide overhang compared to the sense strand;
wherein the antisense strand and the sense strand each comprise at least one modified nucleotide selected from a 2′-O-methyl modified nucleotide or a 2′-fluoro modified nucleotide;
wherein the antisense strand and the sense strand each comprise at least one phosphorothioate linkage; and
wherein the dsRNA further comprises a ligand or targeting moiety that comprises at least one N-acetyl-galactosamine (GalNAc), wherein the ligand or targeting moiety is conjugated to the 5′ end of the sense strand of the dsRNA.

93. A pharmaceutical composition comprising the dsRNA of claim 82, and a pharmaceutically acceptable carrier, diluent, excipient, or combination thereof.

94. A pharmaceutical composition comprising the dsRNA of claim 92, and a pharmaceutically acceptable carrier, diluent, excipient, or combination thereof.

95. A method of inhibiting Inhibin Subunit Beta E (INHBE) expression in a cell, the method comprising: (a) contacting the cell with the dsRNA of claim 82; and (b) maintaining the cell produced in step (a) for a time sufficient to obtain degradation of the mRNA transcript of an INHBE gene, thereby inhibiting expression of the INHBE gene in the cell.

96. A method of inhibiting Inhibin Subunit Beta E (INHBE) expression in a cell, the method comprising: (a) contacting the cell with the dsRNA of claim 92; and (b) maintaining the cell produced in step (a) for a time sufficient to obtain degradation of the mRNA transcript of an INHBE gene, thereby inhibiting expression of the INHBE gene in the cell.

97. A method of treating a disorder mediated by or associated with Inhibin Subunit Beta E (INHBE) comprising administering to a subject in need of such treatment a therapeutically effective amount of the dsRNA of claim 82.

98. A method of treating a disorder mediated by or associated with Inhibin Subunit Beta E (INHBE) comprising administering to a subject in need of such treatment a therapeutically effective amount of the dsRNA of claim 92.

The application's sequence listing, which the Patent Office published only in electronic form, follows.

SEQUENCE LISTING (681 sequences)

SEQ ID NO: 1 - RNA, 21 nt, synthetic construct
  source 1..21: mol_type = other RNA
gggtcaagcacagctatccat

SEQ ID NO: 2 - RNA, 21 nt, synthetic construct
  source 1..21: mol_type = other RNA
cacagctatccatcagatgat

SEQ ID NO: 3 - RNA, 21 nt, synthetic construct
  source 1..21: mol_type = other RNA
cagctatccatcagatgatct

SEQ ID NO: 4 - RNA, 21 nt, synthetic construct
  source 1..21: mol_type = other RNA
agctatccatcagatgatcta

SEQ ID NO: 5 - RNA, 21 nt, synthetic construct
  source 1..21: mol_type = other RNA
ctatccatcagatgatctact

SEQ ID NO: 6 - RNA, 21 nt, synthetic construct
  source 1..21: mol_type = other RNA
tatccatcagatgatctactt

SEQ ID NO: 7 - RNA, 21 nt, synthetic construct
  source 1..21: mol_type = other RNA
ccatcagatgatctactttca

SEQ ID NO: 8 - RNA, 21 nt, synthetic construct
  source 1..21: mol_type = other RNA
ctactttcagccttcctgagt

SEQ ID NO: 9 - RNA, 21 nt, synthetic construct
  source 1..21: mol_type = other RNA
gacaatagaagacaggtggct

SEQ ID NO: 10 - RNA, 21 nt, synthetic construct
  source 1..21: mol_type = other RNA
gcagtggtgtctgctgtcact

SEQ ID NO: 11 - RNA, 21 nt, synthetic construct
  source 1..21: mol_type = other RNA
ctcattggcccccagcaatca

SEQ ID NO: 12 - RNA, 21 nt, synthetic construct
  source 1..21: mol_type = other RNA
ctcctgtgggggctccaaact

SEQ ID NO: 13 - RNA, 21 nt, synthetic construct
  source 1..21: mol_type = other RNA
ctggagctagccaagcagcaa

SEQ ID NO: 14 - RNA, 21 nt, synthetic construct
  source 1..21: mol_type = other RNA
tggagctagccaagcagcaaa

SEQ ID NO: 15 - RNA, 21 nt, synthetic construct
  source 1..21: mol_type = other RNA
ggagctagccaagcagcaaat

SEQ ID NO: 16 - RNA, 21 nt, synthetic construct
  source 1..21: mol_type = other RNA
gagctagccaagcagcaaatc

SEQ ID NO: 17 - RNA, 21 nt, synthetic construct
  source 1..21: mol_type = other RNA
agctagccaagcagcaaatcc

SEQ ID NO: 18 - RNA, 21 nt, synthetic construct
  source 1..21: mol_type = other RNA
gctagccaagcagcaaatcct

SEQ ID NO: 19 - RNA, 21 nt, synthetic construct
  source 1..21: mol_type = other RNA
tagccaagcagcaaatcctgg

SEQ ID NO: 20 - RNA, 21 nt, synthetic construct
  source 1..21: mol_type = other RNA
gccaagcagcaaatcctggat

SEQ ID NO: 21 - RNA, 21 nt, synthetic construct
  source 1..21: mol_type = other RNA
tgaccagtcgtcccagaataa

SEQ ID NO: 22 - RNA, 21 nt, synthetic construct
  source 1..21: mol_type = other RNA
accagtcgtcccagaataact

SEQ ID NO: 23 - RNA, 21 nt, synthetic construct
  source 1..21: mol_type = other RNA
cgtcccagaataactcatcct

SEQ ID NO: 24 - RNA, 21 nt, synthetic construct
  source 1..21: mol_type = other RNA
cgctgaccagagccctccgga

SEQ ID NO: 25 - RNA, 21 nt, synthetic construct
  source 1..21: mol_type = other RNA
gctgaccagagccctccggag

SEQ ID NO: 26 - RNA, 21 nt, synthetic construct
  source 1..21: mol_type = other RNA
ctgaccagagccctccggaga

SEQ ID NO: 27 - RNA, 21 nt, synthetic construct
  source 1..21: mol_type = other RNA
tgaccagagccctccggagac

SEQ ID NO: 28 - RNA, 21 nt, synthetic construct
  source 1..21: mol_type = other RNA
gaccagagccctccggagact

SEQ ID NO: 29 - RNA, 21 nt, synthetic construct
  source 1..21: mol_type = other RNA
accagagccctccggagacta

SEQ ID NO: 30 - RNA, 21 nt, synthetic construct
  source 1..21: mol_type = other RNA
agggaatggggaggaggtcat

SEQ ID NO: 31 - RNA, 21 nt, synthetic construct
  source 1..21: mol_type = other RNA
aggaggtcatcagctttgcta

SEQ ID NO: 32 - RNA, 21 nt, synthetic construct
  source 1..21: mol_type = other RNA
gaggtcatcagctttgctact

SEQ ID NO: 33 - RNA, 21 nt, synthetic construct
  source 1..21: mol_type = other RNA
gctttgctactgtcacagact

SEQ ID NO: 34 - RNA, 21 nt, synthetic construct
  source 1..21: mol_type = other RNA
cggtcccaccacctgtaccat

SEQ ID NO: 35 - RNA, 21 nt, synthetic construct
  source 1..21: mol_type = other RNA
ggtcccaccacctgtaccatg

SEQ ID NO: 36 - RNA, 21 nt, synthetic construct
  source 1..21: mol_type = other RNA
gtcccaccacctgtaccatgc

SEQ ID NO: 37 - RNA, 21 nt, synthetic construct
  source 1..21: mol_type = other RNA
tcccaccacctgtaccatgcc

SEQ ID NO: 38 - RNA, 21 nt, synthetic construct
  source 1..21: mol_type = other RNA
cccaccacctgtaccatgccc

SEQ ID NO: 39 - RNA, 21 nt, synthetic construct
  source 1..21: mol_type = other RNA
ccaccacctgtaccatgcccg

SEQ ID NO: 40 - RNA, 21 nt, synthetic construct
  source 1..21: mol_type = other RNA
caccacctgtaccatgcccgc

SEQ ID NO: 41 - RNA, 21 nt, synthetic construct
  source 1..21: mol_type = other RNA
accacctgtaccatgcccgcc

SEQ ID NO: 42 - RNA, 21 nt, synthetic construct
  source 1..21: mol_type = other RNA
ccacctgtaccatgcccgcct

SEQ ID NO: 43 - RNA, 21 nt, synthetic construct
  source 1..21: mol_type = other RNA
cacctgtaccatgcccgcctg

SEQ ID NO: 44 - RNA, 21 nt, synthetic construct
  source 1..21: mol_type = other RNA
ccacccttcctggcactcttt

SEQ ID NO: 45 - RNA, 21 nt, synthetic construct
  source 1..21: mol_type = other RNA
cccttcctggcactctttgct

SEQ ID NO: 46 - RNA, 21 nt, synthetic construct
  source 1..21: mol_type = other RNA
tggcactctttgcttgaggat

SEQ ID NO: 47 - RNA, 21 nt, synthetic construct
  source 1..21: mol_type = other RNA
gcactctttgcttgaggatct

SEQ ID NO: 48 - RNA, 21 nt, synthetic construct
  source 1..21: mol_type = other RNA
cactctttgcttgaggatctt

SEQ ID NO: 49 - RNA, 21 nt, synthetic construct
  source 1..21: mol_type = other RNA
ctagtggcttgaggggtgaga

SEQ ID NO: 50 - RNA, 21 nt, synthetic construct
  source 1..21: mol_type = other RNA
ggcttgaggggtgagaagtct

SEQ ID NO: 51 - RNA, 21 nt, synthetic construct
  source 1..21: mol_type = other RNA
gaagtctggtgtcctgaaact

SEQ ID NO: 52 - RNA, 21 nt, synthetic construct
  source 1..21: mol_type = other RNA
tggtgtcctgaaactgcaact

SEQ ID NO: 53 - RNA, 21 nt, synthetic construct
  source 1..21: mol_type = other RNA
ggtgtcctgaaactgcaacta

SEQ ID NO: 54 - RNA, 21 nt, synthetic construct
  source 1..21: mol_type = other RNA
cagcccttcctagagcttaag

SEQ ID NO: 55 - RNA, 21 nt, synthetic construct
  source 1..21: mol_type = other RNA
gcccttcctagagcttaagat

SEQ ID NO: 56 - RNA, 21 nt, synthetic construct
  source 1..21: mol_type = other RNA
gagcttaagatccgagccaat

SEQ ID NO: 57 - RNA, 21 nt, synthetic construct
  source 1..21: mol_type = other RNA
ccattacgtagacttccagga

SEQ ID NO: 58 - RNA, 21 nt, synthetic construct
  source 1..21: mol_type = other RNA
cccgaggggtaccagctgaat

SEQ ID NO: 59 - RNA, 21 nt, synthetic construct
  source 1..21: mol_type = other RNA
cgaggggtaccagctgaatta

SEQ ID NO: 60 - RNA, 21 nt, synthetic construct
  source 1..21: mol_type = other RNA
ggtaccagctgaattactgca

SEQ ID NO: 61 - RNA, 21 nt, synthetic construct
  source 1..21: mol_type = other RNA
gtaccagctgaattactgcag

SEQ ID NO: 62 - RNA, 21 nt, synthetic construct
  source 1..21: mol_type = other RNA
taccagctgaattactgcagt

SEQ ID NO: 63 - RNA, 21 nt, synthetic construct
  source 1..21: mol_type = other RNA
accagctgaattactgcagtg

SEQ ID NO: 64 - RNA, 21 nt, synthetic construct
  source 1..21: mol_type = other RNA
ccagctgaattactgcagtgg

SEQ ID NO: 65 - RNA, 21 nt, synthetic construct
  source 1..21: mol_type = other RNA
agctgaattactgcagtgggc

SEQ ID NO: 66 - RNA, 21 nt, synthetic construct
  source 1..21: mol_type = other RNA
gctgaattactgcagtgggca

SEQ ID NO: 67 - RNA, 21 nt, synthetic construct
  source 1..21: mol_type = other RNA
ctgaattactgcagtgggcag

SEQ ID NO: 68 - RNA, 21 nt, synthetic construct
  source 1..21: mol_type = other RNA
attactgcagtgggcagtgcc

SEQ ID NO: 69 - RNA, 21 nt, synthetic construct
  source 1..21: mol_type = other RNA
ggcattgctgcctctttccat

SEQ ID NO: 70 - RNA, 21 nt, synthetic construct
  source 1..21: mol_type = other RNA
gcattgctgcctctttccatt

SEQ ID NO: 71 - RNA, 21 nt, synthetic construct
  source 1..21: mol_type = other RNA
ctctttccattctgccgtctt

SEQ ID NO: 72 - RNA, 21 nt, synthetic construct
  source 1..21: mol_type = other RNA
tcagcctcctcaaagccaaca

SEQ ID NO: 73 - RNA, 21 nt, synthetic construct
  source 1..21: mol_type = other RNA
cagcctcctcaaagccaacaa

SEQ ID NO: 74 - RNA, 21 nt, synthetic construct
  source 1..21: mol_type = other RNA
tcctcaaagccaacaatcctt

SEQ ID NO: 75 - RNA, 21 nt, synthetic construct
  source 1..21: mol_type = other RNA
tctctcctctacctggatcat

SEQ ID NO: 76 - RNA, 21 nt, synthetic construct
  source 1..21: mol_type = other RNA
tctcctctacctggatcataa

SEQ ID NO: 77 - RNA, 21 nt, synthetic construct
  source 1..21: mol_type = other RNA
ctcctctacctggatcataat

SEQ ID NO: 78 - RNA, 21 nt, synthetic construct
  source 1..21: mol_type = other RNA
tacctggatcataatggcaat

SEQ ID NO: 79 - RNA, 21 nt, synthetic construct
  source 1..21: mol_type = other RNA
cctggatcataatggcaatgt

SEQ ID NO: 80 - RNA, 21 nt, synthetic construct
  source 1..21: mol_type = other RNA
atcataatggcaatgtggtca

SEQ ID NO: 81 - RNA, 21 nt, synthetic construct
  source 1..21: mol_type = other RNA
tcataatggcaatgtggtcaa

SEQ ID NO: 82 - RNA, 21 nt, synthetic construct
  source 1..21: mol_type = other RNA
cataatggcaatgtggtcaag

SEQ ID NO: 83 - RNA, 21 nt, synthetic construct
  source 1..21: mol_type = other RNA
ataatggcaatgtggtcaaga

SEQ ID NO: 84 - RNA, 21 nt, synthetic construct
  source 1..21: mol_type = other RNA
taatggcaatgtggtcaagac

SEQ ID NO: 85 - RNA, 21 nt, synthetic construct
  source 1..21: mol_type = other RNA
aatggcaatgtggtcaagacg

SEQ ID NO: 86 - RNA, 21 nt, synthetic construct
  source 1..21: mol_type = other RNA
caatgtggtcaagacggatgt

SEQ ID NO: 87 - RNA, 21 nt, synthetic construct
  source 1..21: mol_type = other RNA
caagacggatgtgccagatat

SEQ ID NO: 88 - RNA, 21 nt, synthetic construct
  source 1..21: mol_type = other RNA
gaggcctgtggctgcagctag

SEQ ID NO: 89 - RNA, 21 nt, synthetic construct
  source 1..21: mol_type = other RNA
aggcctgtggctgcagctagc

SEQ ID NO: 90 - RNA, 21 nt, synthetic construct
  source 1..21: mol_type = other RNA
ggcctgtggctgcagctagca

SEQ ID NO: 91 - RNA, 21 nt, synthetic construct
  source 1..21: mol_type = other RNA
gcctgtggctgcagctagcaa

SEQ ID NO: 92 - RNA, 21 nt, synthetic construct
  source 1..21: mol_type = other RNA
cctgtggctgcagctagcaag

SEQ ID NO: 93 - RNA, 21 nt, synthetic construct
  source 1..21: mol_type = other RNA
gctttggagtgaagagaccaa

SEQ ID NO: 94 - RNA, 21 nt, synthetic construct
  source 1..21: mol_type = other RNA
caaccacctggcaatatgact

SEQ ID NO: 95 - RNA, 21 nt, synthetic construct
  source 1..21: mol_type = other RNA
accacctggcaatatgactca

SEQ ID NO: 96 - RNA, 21 nt, synthetic construct
  source 1..21: mol_type = other RNA
cacctggcaatatgactcact

SEQ ID NO: 97 - RNA, 21 nt, synthetic construct
  source 1..21: mol_type = other RNA
ggacccaaatgggcactttct

SEQ ID NO: 98 - RNA, 21 nt, synthetic construct
  source 1..21: mol_type = other RNA
cccaaatgggcactttcttgt

SEQ ID NO: 99 - RNA, 21 nt, synthetic construct
  source 1..21: mol_type = other RNA
caaatgggcactttcttgtct

SEQ ID NO: 100 - RNA, 21 nt, synthetic construct
  source 1..21: mol_type = other RNA
ggcactttcttgtctgagact

SEQ ID NO: 101 - RNA, 21 nt, synthetic construct
  source 1..21: mol_type = other RNA
cactttcttgtctgagactct

SEQ ID NO: 102 - RNA, 21 nt, synthetic construct
  source 1..21: mol_type = other RNA
cttgtctgagactctggctta

SEQ ID NO: 103 - RNA, 21 nt, synthetic construct
  source 1..21: mol_type = other RNA
agggaaggcagagaaaaatta

SEQ ID NO: 104 - RNA, 21 nt, synthetic construct
  source 1..21: mol_type = other RNA
gggaaggcagagaaaaattac

SEQ ID NO: 105 - RNA, 21 nt, synthetic construct
  source 1..21: mol_type = other RNA
agcctctcccaagatgagaaa

SEQ ID NO: 106 - RNA, 21 nt, synthetic construct
  source 1..21: mol_type = other RNA
cctctcccaagatgagaaagt

SEQ ID NO: 107 - RNA, 21 nt, synthetic construct
  source 1..21: mol_type = other RNA
ctcccaagatgagaaagtcct

SEQ ID NO: 108 - RNA, 21 nt, synthetic construct
  source 1..21: mol_type = other RNA
ggggaggaggaagcagataga

SEQ ID NO: 109 - RNA, 21 nt, synthetic construct
  source 1..21: mol_type = other RNA
gggaggaggaagcagatagat

SEQ ID NO: 110 - RNA, 21 nt, synthetic construct
  source 1..21: mol_type = other RNA
cagaaacaggagtcaggaaaa

SEQ ID NO: 111 - RNA, 21 nt, synthetic construct
  source 1..21: mol_type = other RNA
gcactaagcctaagaagttcc

SEQ ID NO: 112 - RNA, 21 nt, synthetic construct
  source 1..21: mol_type = other RNA
cccactgggagacaagcattt

SEQ ID NO: 113 - RNA, 21 nt, synthetic construct
  source 1..21: mol_type = other RNA
ccactgggagacaagcattta

SEQ ID NO: 114 - RNA, 21 nt, synthetic construct
  source 1..21: mol_type = other RNA
actgggagacaagcatttata

SEQ ID NO: 115 - RNA, 21 nt, synthetic construct
  source 1..21: mol_type = other RNA
tgggagacaagcatttatact

SEQ ID NO: 116 - RNA, 21 nt, synthetic construct
  source 1..21: mol_type = other RNA
gggagacaagcatttatactt

SEQ ID NO: 117 - RNA, 21 nt, synthetic construct
  source 1..21: mol_type = other RNA
gacaagcatttatactttctt

SEQ ID NO: 118 - RNA, 21 nt, synthetic construct
  source 1..21: mol_type = other RNA
gagccaccgcgcctggcttat

SEQ ID NO: 119 - RNA, 21 nt, synthetic construct
  source 1..21: mol_type = other RNA
ccaccgcgcctggcttatact

SEQ ID NO: 120 - RNA, 21 nt, synthetic construct
  source 1..21: mol_type = other RNA
accgcgcctggcttatacttt

SEQ ID NO: 121 - RNA, 21 nt, synthetic construct
  source 1..21: mol_type = other RNA
cgcgcctggcttatactttct

SEQ ID NO: 122 - RNA, 21 nt, synthetic construct
  source 1..21: mol_type = other RNA
gcgcctggcttatactttctt

SEQ ID NO: 123 - RNA, 21 nt, synthetic construct
  source 1..21: mol_type = other RNA
cgcctggcttatactttctta

SEQ ID NO: 124 - RNA, 21 nt, synthetic construct
  source 1..21: mol_type = other RNA
gcctggcttatactttcttaa

SEQ ID NO: 125 - RNA, 21 nt, synthetic construct
  source 1..21: mol_type = other RNA
cctggcttatactttcttaat

SEQ ID NO: 126 - RNA, 21 nt, synthetic construct
  source 1..21: mol_type = other RNA
tggcttatactttcttaataa

SEQ ID NO: 127 - RNA, 21 nt, synthetic construct
  source 1..21: mol_type = other RNA
ggcttatactttcttaataaa

SEQ ID NO: 128 - RNA, 21 nt, synthetic construct
  source 1..21: mol_type = other RNA
cttatactttcttaataaaaa

SEQ ID NO: 129 - RNA, 21 nt, synthetic construct
  source 1..21: mol_type = other RNA
aggggtgtccacaaagtcaaa

SEQ ID NO: 130 - RNA, 21 nt, synthetic construct
  source 1..21: mol_type = other RNA
ggggtgtccacaaagtcaaag

SEQ ID NO: 131 - RNA, 21 nt, synthetic construct
  source 1..21: mol_type = other RNA
tcataataatactaacatgtt

SEQ ID NO: 132 - RNA, 21 nt, synthetic construct
  source 1..21: mol_type = other RNA
actaacatgttatttgccttt

SEQ ID NO: 133 - RNA, 21 nt, synthetic construct
  source 1..21: mol_type = other RNA
gttatttgccttttgaattct

SEQ ID NO: 134 - RNA, 21 nt, synthetic construct
  source 1..21: mol_type = other RNA
tgccttttgaattctcattat

SEQ ID NO: 135 - RNA, 21 nt, synthetic construct
  source 1..21: mol_type = other RNA
gccttttgaattctcattatc

SEQ ID NO: 136 - RNA, 21 nt, synthetic construct
  source 1..21: mol_type = other RNA
ccttttgaattctcattatct

SEQ ID NO: 137 - RNA, 21 nt, synthetic construct
  source 1..21: mol_type = other RNA
cttttgaattctcattatctt

SEQ ID NO: 138 - RNA, 21 nt, synthetic construct
  source 1..21: mol_type = other RNA
tgaattctcattatcttaaaa

SEQ ID NO: 139 - RNA, 21 nt, synthetic construct
  source 1..21: mol_type = other RNA
gaattctcattatcttaaaat

SEQ ID NO: 140 - RNA, 21 nt, synthetic construct
  source 1..21: mol_type = other RNA
ccgtgtgacatgtgattacat

SEQ ID NO: 141 - RNA, 21 nt, synthetic construct
  source 1..21: mol_type = other RNA
tgtgacatgtgattacatcat

SEQ ID NO: 142 - RNA, 21 nt, synthetic construct
  source 1..21: mol_type = other RNA
tgacatgtgattacatcatct

SEQ ID NO: 143 - RNA, 21 nt, synthetic construct
  source 1..21: mol_type = other RNA
gacatgtgattacatcatctt

SEQ ID NO: 144 - RNA, 21 nt, synthetic construct
  source 1..21: mol_type = other RNA
tctttctgacatcattgttaa

SEQ ID NO: 145 - RNA, 21 nt, synthetic construct
  source 1..21: mol_type = other RNA
ctttctgacatcattgttaat

SEQ ID NO: 146 - RNA, 21 nt, synthetic construct
  source 1..21: mol_type = other RNA
gacatcattgttaatggaatg

SEQ ID NO: 147 - RNA, 21 nt, synthetic construct
  source 1..21: mol_type = other RNA
gttaatggaatgtgtgcttgt

SEQ ID NO: 148 - RNA, 23 nt, synthetic construct
  source 1..23: mol_type = other RNA
atcatctgatggatagctgtgct

SEQ ID NO: 149 - RNA, 23 nt, synthetic construct
  source 1..23: mol_type = other RNA
agatcatctgatggatagctgtg

SEQ ID NO: 150 - RNA, 23 nt, synthetic construct
  source 1..23: mol_type = other RNA
tagatcatctgatggatagctgt

SEQ ID NO: 151 - RNA, 23 nt, synthetic construct
  source 1..23: mol_type = other RNA
agtagatcatctgatggatagct

SEQ ID NO: 152 - RNA, 23 nt, synthetic construct
  source 1..23: mol_type = other RNA
aagtagatcatctgatggatagc

SEQ ID NO: 153 - RNA, 23 nt, synthetic construct
  source 1..23: mol_type = other RNA
tgaaagtagatcatctgatggat

SEQ ID NO: 154 - RNA, 23 nt, synthetic construct
  source 1..23: mol_type = other RNA
actcaggaaggctgaaagtagat

SEQ ID NO: 155 - RNA, 23 nt, synthetic construct
  source 1..23: mol_type = other RNA
agccacctgtcttctattgtctg

SEQ ID NO: 156 - RNA, 23 nt, synthetic construct
  source 1..23: mol_type = other RNA
agtgacagcagacaccactgcca

SEQ ID NO: 157 - RNA, 23 nt, synthetic construct
  source 1..23: mol_type = other RNA
tgattgctgggggccaatgaggg

SEQ ID NO: 158 - RNA, 23 nt, synthetic construct
  source 1..23: mol_type = other RNA
agtttggagcccccacaggaggg

SEQ ID NO: 159 - RNA, 23 nt, synthetic construct
  source 1..23: mol_type = other RNA
ttgctgcttggctagctccagca

SEQ ID NO: 160 - RNA, 23 nt, synthetic construct
  source 1..23: mol_type = other RNA
tttgctgcttggctagctccagc

SEQ ID NO: 161 - RNA, 23 nt, synthetic construct
  source 1..23: mol_type = other RNA
atttgctgcttggctagctccag

SEQ ID NO: 162 - RNA, 23 nt, synthetic construct
  source 1..23: mol_type = other RNA
gatttgctgcttggctagctcca

SEQ ID NO: 163 - RNA, 23 nt, synthetic construct
  source 1..23: mol_type = other RNA
ggatttgctgcttggctagctcc

SEQ ID NO: 164 - RNA, 23 nt, synthetic construct
  source 1..23: mol_type = other RNA
aggatttgctgcttggctagctc

SEQ ID NO: 165 - RNA, 23 nt, synthetic construct
  source 1..23: mol_type = other RNA
ccaggatttgctgcttggctagc

SEQ ID NO: 166 - RNA, 23 nt, synthetic construct
  source 1..23: mol_type = other RNA
atccaggatttgctgcttggcta

SEQ ID NO: 167 - RNA, 23 nt, synthetic construct
  source 1..23: mol_type = other RNA
ttattctgggacgactggtcagg

SEQ ID NO: 168 - RNA, 23 nt, synthetic construct
  source 1..23: mol_type = other RNA
agttattctgggacgactggtca

SEQ ID NO: 169 - RNA, 23 nt, synthetic construct
  source 1..23: mol_type = other RNA
aggatgagttattctgggacgac

SEQ ID NO: 170 - RNA, 23 nt, synthetic construct
  source 1..23: mol_type = other RNA
tccggagggctctggtcagcgct

SEQ ID NO: 171 - RNA, 23 nt, synthetic construct
  source 1..23: mol_type = other RNA
ctccggagggctctggtcagcgc

SEQ ID NO: 172 - RNA, 23 nt, synthetic construct
  source 1..23: mol_type = other RNA
tctccggagggctctggtcagcg

SEQ ID NO: 173 - RNA, 23 nt, synthetic construct
  source 1..23: mol_type = other RNA
gtctccggagggctctggtcagc

SEQ ID NO: 174 - RNA, 23 nt, synthetic construct
  source 1..23: mol_type = other RNA
agtctccggagggctctggtcag

SEQ ID NO: 175 - RNA, 23 nt, synthetic construct
  source 1..23: mol_type = other RNA
tagtctccggagggctctggtca

SEQ ID NO: 176 - RNA, 23 nt, synthetic construct
  source 1..23: mol_type = other RNA
atgacctcctccccattccctgg

SEQ ID NO: 177 - RNA, 23 nt, synthetic construct
  source 1..23: mol_type = other RNA
tagcaaagctgatgacctcctcc

SEQ ID NO: 178 - RNA, 23 nt, synthetic construct
  source 1..23: mol_type = other RNA
agtagcaaagctgatgacctcct

SEQ ID NO: 179 - RNA, 23 nt, synthetic construct
  source 1..23: mol_type = other RNA
agtctgtgacagtagcaaagctg

SEQ ID NO: 180 - RNA, 23 nt, synthetic construct
  source 1..23: mol_type = other RNA
atggtacaggtggtgggaccgag

SEQ ID NO: 181 - RNA, 23 nt, synthetic construct
  source 1..23: mol_type = other RNA
catggtacaggtggtgggaccga

SEQ ID NO: 182 - RNA, 23 nt, synthetic construct
  source 1..23: mol_type = other RNA
gcatggtacaggtggtgggaccg

SEQ ID NO: 183 - RNA, 23 nt, synthetic construct
  source 1..23: mol_type = other RNA
ggcatggtacaggtggtgggacc

SEQ ID NO: 184 - RNA, 23 nt, synthetic construct
  source 1..23: mol_type = other RNA
gggcatggtacaggtggtgggac

SEQ ID NO: 185 - RNA, 23 nt, synthetic construct
  source 1..23: mol_type = other RNA
cgggcatggtacaggtggtggga

SEQ ID NO: 186 - RNA, 23 nt, synthetic construct
  source 1..23: mol_type = other RNA
gcgggcatggtacaggtggtggg

SEQ ID NO: 187 - RNA, 23 nt, synthetic construct
  source 1..23: mol_type = other RNA
ggcgggcatggtacaggtggtgg

SEQ ID NO: 188 - RNA, 23 nt, synthetic construct
  source 1..23: mol_type = other RNA
aggcgggcatggtacaggtggtg

SEQ ID NO: 189 - RNA, 23 nt, synthetic construct
  source 1..23: mol_type = other RNA
caggcgggcatggtacaggtggt

SEQ ID NO: 190 - RNA, 23 nt, synthetic construct
  source 1..23: mol_type = other RNA
aaagagtgccaggaagggtgggg

SEQ ID NO: 191 - RNA, 23 nt, synthetic construct
  source 1..23: mol_type = other RNA
agcaaagagtgccaggaagggtg

SEQ ID NO: 192 - RNA, 23 nt, synthetic construct
  source 1..23: mol_type = other RNA
atcctcaagcaaagagtgccagg

SEQ ID NO: 193 - RNA, 23 nt, synthetic construct
  source 1..23: mol_type = other RNA
agatcctcaagcaaagagtgcca

SEQ ID NO: 194 - RNA, 23 nt, synthetic construct
  source 1..23: mol_type = other RNA
aagatcctcaagcaaagagtgcc

SEQ ID NO: 195 - RNA, 23 nt, synthetic construct
  source 1..23: mol_type = other RNA
tctcacccctcaagccactagag

SEQ ID NO: 196 - RNA, 23 nt, synthetic construct
  source 1..23: mol_type = other RNA
agacttctcacccctcaagccac

SEQ ID NO: 197 - RNA, 23 nt, synthetic construct
  source 1..23: mol_type = other RNA
agtttcaggacaccagacttctc

SEQ ID NO: 198 - RNA, 23 nt, synthetic construct
  source 1..23: mol_type = other RNA
agttgcagtttcaggacaccaga

SEQ ID NO: 199 - RNA, 23 nt, synthetic construct
  source 1..23: mol_type = other RNA
tagttgcagtttcaggacaccag

SEQ ID NO: 200 - RNA, 23 nt, synthetic construct
  source 1..23: mol_type = other RNA
cttaagctctaggaagggctgct

SEQ ID NO: 201 - RNA, 23 nt, synthetic construct
  source 1..23: mol_type = other RNA
atcttaagctctaggaagggctg

SEQ ID NO: 202 - RNA, 23 nt, synthetic construct
  source 1..23: mol_type = other RNA
attggctcggatcttaagctcta

SEQ ID NO: 203 - RNA, 23 nt, synthetic construct
  source 1..23: mol_type = other RNA
tcctggaagtctacgtaatggtc

SEQ ID NO: 204 - RNA, 23 nt, synthetic construct
  source 1..23: mol_type = other RNA
attcagctggtacccctcgggct

SEQ ID NO: 205 - RNA, 23 nt, synthetic construct
  source 1..23: mol_type = other RNA
taattcagctggtacccctcggg

SEQ ID NO: 206 - RNA, 23 nt, synthetic construct
  source 1..23: mol_type = other RNA
tgcagtaattcagctggtacccc

SEQ ID NO: 207 - RNA, 23 nt, synthetic construct
  source 1..23: mol_type = other RNA
ctgcagtaattcagctggtaccc

SEQ ID NO: 208 - RNA, 23 nt, synthetic construct
  source 1..23: mol_type = other RNA
actgcagtaattcagctggtacc

SEQ ID NO: 209 - RNA, 23 nt, synthetic construct
  source 1..23: mol_type = other RNA
cactgcagtaattcagctggtac

SEQ ID NO: 210 - RNA, 23 nt, synthetic construct
  source 1..23: mol_type = other RNA
ccactgcagtaattcagctggta

SEQ ID NO: 211 - RNA, 23 nt, synthetic construct
  source 1..23: mol_type = other RNA
gcccactgcagtaattcagctgg

SEQ ID NO: 212 - RNA, 23 nt, synthetic construct
  source 1..23: mol_type = other RNA
tgcccactgcagtaattcagctg

SEQ ID NO: 213 - RNA, 23 nt, synthetic construct
  source 1..23: mol_type = other RNA
ctgcccactgcagtaattcagct

SEQ ID NO: 214 - RNA, 23 nt, synthetic construct
  source 1..23: mol_type = other RNA
ggcactgcccactgcagtaattc

SEQ ID NO: 215 - RNA, 23 nt, synthetic construct
  source 1..23: mol_type = other RNA
atggaaagaggcagcaatgcctg

SEQ ID NO: 216 - RNA, 23 nt, synthetic construct
  source 1..23: mol_type = other RNA
aatggaaagaggcagcaatgcct

SEQ ID NO: 217 - RNA, 23 nt, synthetic construct
  source 1..23: mol_type = other RNA
aagacggcagaatggaaagaggc

SEQ ID NO: 218 - RNA, 23 nt, synthetic construct
  source 1..23: mol_type = other RNA
tgttggctttgaggaggctgaag

SEQ ID NO: 219 - RNA, 23 nt, synthetic construct
  source 1..23: mol_type = other RNA
ttgttggctttgaggaggctgaa

SEQ ID NO: 220 - RNA, 23 nt, synthetic construct
  source 1..23: mol_type = other RNA
aaggattgttggctttgaggagg

SEQ ID NO: 221 - RNA, 23 nt, synthetic construct
  source 1..23: mol_type = other RNA
atgatccaggtagaggagagaga

SEQ ID NO: 222 - RNA, 23 nt, synthetic construct
  source 1..23: mol_type = other RNA
ttatgatccaggtagaggagaga

SEQ ID NO: 223 - RNA, 23 nt, synthetic construct
  source 1..23: mol_type = other RNA
attatgatccaggtagaggagag

SEQ ID NO: 224 - RNA, 23 nt, synthetic construct
  source 1..23: mol_type = other RNA
attgccattatgatccaggtaga

SEQ ID NO: 225 - RNA, 23 nt, synthetic construct
  source 1..23: mol_type = other RNA
acattgccattatgatccaggta

SEQ ID NO: 226 - RNA, 23 nt, synthetic construct
  source 1..23: mol_type = other RNA
tgaccacattgccattatgatcc

SEQ ID NO: 227 - RNA, 23 nt, synthetic construct
  source 1..23: mol_type = other RNA
ttgaccacattgccattatgatc

SEQ ID NO: 228 - RNA, 23 nt, synthetic construct
  source 1..23: mol_type = other RNA
cttgaccacattgccattatgat

SEQ ID NO: 229 - RNA, 23 nt, synthetic construct
  source 1..23: mol_type = other RNA
tcttgaccacattgccattatga

SEQ ID NO: 230 - RNA, 23 nt, synthetic construct
  source 1..23: mol_type = other RNA
gtcttgaccacattgccattatg

SEQ ID NO: 231 - RNA, 23 nt, synthetic construct
  source 1..23: mol_type = other RNA
cgtcttgaccacattgccattat

SEQ ID NO: 232 - RNA, 23 nt, synthetic construct
  source 1..23: mol_type = other RNA
acatccgtcttgaccacattgcc

SEQ ID NO: 233 - RNA, 23 nt, synthetic construct
  source 1..23: mol_type = other RNA
atatctggcacatccgtcttgac

SEQ ID NO: 234 - RNA, 23 nt, synthetic construct
  source 1..23: mol_type = other RNA
ctagctgcagccacaggcctcca

SEQ ID NO: 235 - RNA, 23 nt, synthetic construct
  source 1..23: mol_type = other RNA
gctagctgcagccacaggcctcc

SEQ ID NO: 236 - RNA, 23 nt, synthetic construct
  source 1..23: mol_type = other RNA
tgctagctgcagccacaggcctc

SEQ ID NO: 237 - RNA, 23 nt, synthetic construct
  source 1..23: mol_type = other RNA
ttgctagctgcagccacaggcct

SEQ ID NO: 238 - RNA, 23 nt, synthetic construct
  source 1..23: mol_type = other RNA
cttgctagctgcagccacaggcc

SEQ ID NO: 239 - RNA, 23 nt, synthetic construct
  source 1..23: mol_type = other RNA
ttggtctcttcactccaaagccc

SEQ ID NO: 240 - RNA, 23 nt, synthetic construct
  source 1..23: mol_type = other RNA
agtcatattgccaggtggttgtt

SEQ ID NO: 241 - RNA, 23 nt, synthetic construct
  source 1..23: mol_type = other RNA
tgagtcatattgccaggtggttg

SEQ ID NO: 242 - RNA, 23 nt, synthetic construct
  source 1..23: mol_type = other RNA
agtgagtcatattgccaggtggt

SEQ ID NO: 243 - RNA, 23 nt, synthetic construct
  source 1..23: mol_type = other RNA
agaaagtgcccatttgggtccca

SEQ ID NO: 244 - RNA, 23 nt, synthetic construct
  source 1..23: mol_type = other RNA
acaagaaagtgcccatttgggtc

SEQ ID NO: 245 - RNA, 23 nt, synthetic construct
  source 1..23: mol_type = other RNA
agacaagaaagtgcccatttggg

SEQ ID NO: 246 - RNA, 23 nt, synthetic construct
  source 1..23: mol_type = other RNA
agtctcagacaagaaagtgccca

SEQ ID NO: 247 - RNA, 23 nt, synthetic construct
  source 1..23: mol_type = other RNA
agagtctcagacaagaaagtgcc

SEQ ID NO: 248 - RNA, 23 nt, synthetic construct
  source 1..23: mol_type = other RNA
taagccagagtctcagacaagaa

SEQ ID NO: 249 - RNA, 23 nt, synthetic construct
  source 1..23: mol_type = other RNA
taatttttctctgccttccctcc

SEQ ID NO: 250 - RNA, 23 nt, synthetic construct
  source 1..23: mol_type = other RNA
gtaatttttctctgccttccctc

SEQ ID NO: 251 - RNA, 23 nt, synthetic construct
  source 1..23: mol_type = other RNA
tttctcatcttgggagaggctaa

SEQ ID NO: 252 - RNA, 23 nt, synthetic construct
  source 1..23: mol_type = other RNA
actttctcatcttgggagaggct

SEQ ID NO: 253 - RNA, 23 nt, synthetic construct
  source 1..23: mol_type = other RNA
aggactttctcatcttgggagag

SEQ ID NO: 254 - RNA, 23 nt, synthetic construct
  source 1..23: mol_type = other RNA
tctatctgcttcctcctcccctc

SEQ ID NO: 255 - RNA, 23 nt, synthetic construct
  source 1..23: mol_type = other RNA
atctatctgcttcctcctcccct

SEQ ID NO: 256 - RNA, 23 nt, synthetic construct
  source 1..23: mol_type = other RNA
ttttcctgactcctgtttctggg

SEQ ID NO: 257 - RNA, 23 nt, synthetic construct
  source 1..23: mol_type = other RNA
ggaacttcttaggcttagtgcct

SEQ ID NO: 258 - RNA, 23 nt, synthetic construct
  source 1..23: mol_type = other RNA
aaatgcttgtctcccagtgggtc

SEQ ID NO: 259 - RNA, 23 nt, synthetic construct
  source 1..23: mol_type = other RNA
taaatgcttgtctcccagtgggt

SEQ ID NO: 260 - RNA, 23 nt, synthetic construct
  source 1..23: mol_type = other RNA
tataaatgcttgtctcccagtgg

SEQ ID NO: 261 - RNA, 23 nt, synthetic construct
  source 1..23: mol_type = other RNA
agtataaatgcttgtctcccagt

SEQ ID NO: 262 - RNA, 23 nt, synthetic construct
  source 1..23: mol_type = other RNA
aagtataaatgcttgtctcccag

SEQ ID NO: 263 - RNA, 23 nt, synthetic construct
  source 1..23: mol_type = other RNA
aagaaagtataaatgcttgtctc

SEQ ID NO: 264 - RNA, 23 nt, synthetic construct
  source 1..23: mol_type = other RNA
ataagccaggcgcggtggctcac

SEQ ID NO: 265 - RNA, 23 nt, synthetic construct
  source 1..23: mol_type = other RNA
agtataagccaggcgcggtggct

SEQ ID NO: 266 - RNA, 23 nt, synthetic construct
  source 1..23: mol_type = other RNA
aaagtataagccaggcgcggtgg

SEQ ID NO: 267 - RNA, 23 nt, synthetic construct
  source 1..23: mol_type = other RNA
agaaagtataagccaggcgcggt

SEQ ID NO: 268 - RNA, 23 nt, synthetic construct
  source 1..23: mol_type = other RNA
aagaaagtataagccaggcgcgg

SEQ ID NO: 269 - RNA, 23 nt, synthetic construct
  source 1..23: mol_type = other RNA
taagaaagtataagccaggcgcg

SEQ ID NO: 270 - RNA, 23 nt, synthetic construct
  source 1..23: mol_type = other RNA
ttaagaaagtataagccaggcgc

SEQ ID NO: 271 - RNA, 23 nt, synthetic construct
  source 1..23: mol_type = other RNA
attaagaaagtataagccaggcg

SEQ ID NO: 272 - RNA, 23 nt, synthetic construct
  source 1..23: mol_type = other RNA
ttattaagaaagtataagccagg

SEQ ID NO: 273 - RNA, 23 nt, synthetic construct
  source 1..23: mol_type = other RNA
tttattaagaaagtataagccag

SEQ ID NO: 274 - RNA, 23 nt, synthetic construct
  source 1..23: mol_type = other RNA
tttttattaagaaagtataagcc

SEQ ID NO: 275 - RNA, 23 nt, synthetic construct
  source 1..23: mol_type = other RNA
tttgactttgtggacacccctga

SEQ ID NO: 276 - RNA, 23 nt, synthetic construct
  source 1..23: mol_type = other RNA
ctttgactttgtggacacccctg

SEQ ID NO: 277 - RNA, 23 nt, synthetic construct
  source 1..23: mol_type = other RNA
aacatgttagtattattatgaaa

SEQ ID NO: 278 - RNA, 23 nt, synthetic construct
  source 1..23: mol_type = other RNA
aaaggcaaataacatgttagtat

SEQ ID NO: 279 - RNA, 23 nt, synthetic construct
  source 1..23: mol_type = other RNA
agaattcaaaaggcaaataacat

SEQ ID NO: 280 - RNA, 23 nt, synthetic construct
  source 1..23: mol_type = other RNA
ataatgagaattcaaaaggcaaa

SEQ ID NO: 281 - RNA, 23 nt, synthetic construct
  source 1..23: mol_type = other RNA
gataatgagaattcaaaaggcaa

SEQ ID NO: 282 - RNA, 23 nt, synthetic construct
  source 1..23: mol_type = other RNA
agataatgagaattcaaaaggca

SEQ ID NO: 283 - RNA, 23 nt, synthetic construct
  source 1..23: mol_type = other RNA
aagataatgagaattcaaaaggc

SEQ ID NO: 284 - RNA, 23 nt, synthetic construct
  source 1..23: mol_type = other RNA
ttttaagataatgagaattcaaa

SEQ ID NO: 285 - RNA, 23 nt, synthetic construct
  source 1..23: mol_type = other RNA
attttaagataatgagaattcaa

SEQ ID NO: 286 - RNA, 23 nt, synthetic construct
  source 1..23: mol_type = other RNA
atgtaatcacatgtcacacggcc

SEQ ID NO: 287 - RNA, 23 nt, synthetic construct
  source 1..23: mol_type = other RNA
atgatgtaatcacatgtcacacg

SEQ ID NO: 288 - RNA, 23 nt, synthetic construct
  source 1..23: mol_type = other RNA
agatgatgtaatcacatgtcaca

SEQ ID NO: 289 - RNA, 23 nt, synthetic construct
  source 1..23: mol_type = other RNA
aagatgatgtaatcacatgtcac

SEQ ID NO: 290 - RNA, 23 nt, synthetic construct
  source 1..23: mol_type = other RNA
ttaacaatgatgtcagaaagatg

SEQ ID NO: 291 - RNA, 23 nt, synthetic construct
  source 1..23: mol_type = other RNA
attaacaatgatgtcagaaagat

SEQ ID NO: 292 - RNA, 23 nt, synthetic construct
  source 1..23: mol_type = other RNA
cattccattaacaatgatgtcag

SEQ ID NO: 293 - RNA, 23 nt, synthetic construct
  source 1..23: mol_type = other RNA
acaagcacacattccattaacaa

SEQ ID NO: 294 - RNA, 21 nt, synthetic construct
  source 1..21: mol_type = other RNA
  modified_base 1..6: mod_base = OTHER; note = 2'-O-methyl nucleotide
  modified_base 1..3: mod_base = OTHER; note = Phosphorothioate linkage
  modified_base 7: mod_base = OTHER; note = 2'Fluoro nucleotide
  modified_base 8: mod_base = OTHER; note = 2'-O-methyl nucleotide
  modified_base 9..11: mod_base = OTHER; note = 2'Fluoro nucleotide
  modified_base 12..21: mod_base = OTHER; note = 2'-O-methyl nucleotide
gggtcaagcacagctatccat

SEQ ID NO: 295 - RNA, 21 nt, synthetic construct
  source 1..21: mol_type = other RNA
  modified_base 1..6: mod_base = OTHER; note = 2'-O-methyl nucleotide
  modified_base 1..3: mod_base = OTHER; note = Phosphorothioate linkage
  modified_base 7: mod_base = OTHER; note = 2'Fluoro nucleotide
  modified_base 8: mod_base = OTHER; note = 2'-O-methyl nucleotide
  modified_base 9..11: mod_base = OTHER; note = 2'Fluoro nucleotide
  modified_base 12..21: mod_base = OTHER; note = 2'-O-methyl nucleotide
cacagctatccatcagatgat

SEQ ID NO: 296 - RNA, 21 nt, synthetic construct
  source 1..21: mol_type = other RNA
  modified_base 1..6: mod_base = OTHER; note = 2'-O-methyl nucleotide
  modified_base 1..3: mod_base = OTHER; note = Phosphorothioate linkage
  modified_base 7: mod_base = OTHER; note = 2'Fluoro nucleotide
  modified_base 8: mod_base = OTHER; note = 2'-O-methyl nucleotide
  modified_base 9..11: mod_base = OTHER; note = 2'Fluoro nucleotide
  modified_base 12..21: mod_base = OTHER; note = 2'-O-methyl nucleotide
cagctatccatcagatgatct

SEQ ID NO: 297 - RNA, 21 nt, synthetic construct
  source 1..21: mol_type = other RNA
  modified_base 1..6: mod_base = OTHER; note = 2'-O-methyl nucleotide
  modified_base 1..3: mod_base = OTHER; note = Phosphorothioate linkage
  modified_base 7: mod_base = OTHER; note = 2'Fluoro nucleotide
  modified_base 8: mod_base = OTHER; note = 2'-O-methyl nucleotide
  modified_base 9..11: mod_base = OTHER; note = 2'Fluoro nucleotide
  modified_base 12..21: mod_base = OTHER; note = 2'-O-methyl nucleotide
agctatccatcagatgatcta

SEQ ID NO: 298 - RNA, 21 nt, synthetic construct
  source 1..21: mol_type = other RNA
  modified_base 1..6: mod_base = OTHER; note = 2'-O-methyl nucleotide
  modified_base 1..3: mod_base = OTHER; note = Phosphorothioate linkage
  modified_base 7: mod_base = OTHER; note = 2'Fluoro nucleotide
  modified_base 8: mod_base = OTHER; note = 2'-O-methyl nucleotide
  modified_base 9..11: mod_base = OTHER; note = 2'Fluoro nucleotide
  modified_base 12..21: mod_base = OTHER; note = 2'-O-methyl nucleotide
ctatccatcagatgatctact

SEQ ID NO: 299 - RNA, 21 nt, synthetic construct
  source 1..21: mol_type = other RNA
  modified_base 1..6: mod_base = OTHER; note = 2'-O-methyl nucleotide
  modified_base 1..3: mod_base = OTHER; note = Phosphorothioate linkage
  modified_base 7: mod_base = OTHER; note = 2'Fluoro nucleotide
  modified_base 8: mod_base = OTHER; note = 2'-O-methyl nucleotide
  modified_base 9..11: mod_base = OTHER; note = 2'Fluoro nucleotide
  modified_base 12..21: mod_base = OTHER; note = 2'-O-methyl nucleotide
tatccatcagatgatctactt

SEQ ID NO: 300 - RNA, 21 nt, synthetic construct
  source 1..21: mol_type = other RNA
  modified_base 1..6: mod_base = OTHER; note = 2'-O-methyl nucleotide
  modified_base 1..3: mod_base = OTHER; note = Phosphorothioate linkage
  modified_base 7: mod_base = OTHER; note = 2'Fluoro nucleotide
  modified_base 8: mod_base = OTHER; note = 2'-O-methyl nucleotide
  modified_base 9..11: mod_base = OTHER; note = 2'Fluoro nucleotide
  modified_base 12..21: mod_base = OTHER; note = 2'-O-methyl nucleotide
ccatcagatgatctactttca

SEQ ID NO: 301 - RNA, 21 nt, synthetic construct
  source 1..21: mol_type = other RNA
  modified_base 1..6: mod_base = OTHER; note = 2'-O-methyl nucleotide
  modified_base 1..3: mod_base = OTHER; note = Phosphorothioate linkage
  modified_base 7: mod_base = OTHER; note = 2'Fluoro nucleotide
  modified_base 8: mod_base = OTHER; note = 2'-O-methyl nucleotide
  modified_base 9..11: mod_base = OTHER; note = 2'Fluoro nucleotide
  modified_base 12..21: mod_base = OTHER; note = 2'-O-methyl nucleotide
ctactttcagccttcctgagt

SEQ ID NO: 302 - RNA, 21 nt, synthetic construct
  source 1..21: mol_type = other RNA
  modified_base 1..6: mod_base = OTHER; note = 2'-O-methyl nucleotide
  modified_base 1..3: mod_base = OTHER; note = Phosphorothioate linkage
  modified_base 7: mod_base = OTHER; note = 2'Fluoro nucleotide
  modified_base 8: mod_base = OTHER; note = 2'-O-methyl nucleotide
  modified_base 9..11: mod_base = OTHER; note = 2'Fluoro nucleotide
  modified_base 12..21: mod_base = OTHER; note = 2'-O-methyl nucleotide
gacaatagaagacaggtggct

SEQ ID NO: 303 - RNA, 21 nt, synthetic construct
  source 1..21: mol_type = other RNA
  modified_base 1..6: mod_base = OTHER; note = 2'-O-methyl nucleotide
  modified_base 1..3: mod_base = OTHER; note = Phosphorothioate linkage
  modified_base 7: mod_base = OTHER; note = 2'Fluoro nucleotide
  modified_base 8: mod_base = OTHER; note = 2'-O-methyl nucleotide
  modified_base 9..11: mod_base = OTHER; note = 2'Fluoro nucleotide
  modified_base 12..21: mod_base = OTHER; note = 2'-O-methyl nucleotide
gcagtggtgtctgctgtcact

SEQ ID NO: 304 - RNA, 21 nt, synthetic construct
  source 1..21: mol_type = other RNA
  modified_base 1..6: mod_base = OTHER; note = 2'-O-methyl nucleotide
  modified_base 1..3: mod_base = OTHER; note = Phosphorothioate linkage
  modified_base 7: mod_base = OTHER; note = 2'Fluoro nucleotide
  modified_base 8: mod_base = OTHER; note = 2'-O-methyl nucleotide
  modified_base 9..11: mod_base = OTHER; note = 2'Fluoro nucleotide
  modified_base 12..21: mod_base = OTHER; note = 2'-O-methyl nucleotide
ctcattggcccccagcaatca

SEQ ID NO: 305 - RNA, 21 nt, synthetic construct
  source 1..21: mol_type = other RNA
  modified_base 1..6: mod_base = OTHER; note = 2'-O-methyl nucleotide
  modified_base 1..3: mod_base = OTHER; note = Phosphorothioate linkage
  modified_base 7: mod_base = OTHER; note = 2'Fluoro nucleotide
  modified_base 8: mod_base = OTHER; note = 2'-O-methyl nucleotide
  modified_base 9..11: mod_base = OTHER; note = 2'Fluoro nucleotide
  modified_base 12..21: mod_base = OTHER; note = 2'-O-methyl nucleotide
ctcctgtgggggctccaaact

SEQ ID NO: 306 - RNA, 21 nt, synthetic construct
  source 1..21: mol_type = other RNA
  modified_base 1..6: mod_base = OTHER; note = 2'-O-methyl nucleotide
  modified_base 1..3: mod_base = OTHER; note = Phosphorothioate linkage
  modified_base 7: mod_base = OTHER; note = 2'Fluoro nucleotide
  modified_base 8: mod_base = OTHER; note = 2'-O-methyl nucleotide
  modified_base 9..11: mod_base = OTHER; note = 2'Fluoro nucleotide
  modified_base 12..21: mod_base = OTHER; note = 2'-O-methyl nucleotide
ctggagctagccaagcagcaa

SEQ ID NO: 307 - RNA, 21 nt, synthetic construct
  source 1..21: mol_type = other RNA
  modified_base 1..6: mod_base = OTHER; note = 2'-O-methyl nucleotide
  modified_base 1..3: mod_base = OTHER; note = Phosphorothioate linkage
  modified_base 7: mod_base = OTHER; note = 2'Fluoro nucleotide
  modified_base 8: mod_base = OTHER; note = 2'-O-methyl nucleotide
  modified_base 9..11: mod_base = OTHER; note = 2'Fluoro nucleotide
  modified_base 12..21: mod_base = OTHER; note = 2'-O-methyl nucleotide
tggagctagccaagcagcaaa

SEQ ID NO: 308 - RNA, 21 nt, synthetic construct
  source 1..21: mol_type = other RNA
  modified_base 1..6: mod_base = OTHER; note = 2'-O-methyl nucleotide
  modified_base 1..3: mod_base = OTHER; note = Phosphorothioate linkage
  modified_base 7: mod_base = OTHER; note = 2'Fluoro nucleotide
  modified_base 8: mod_base = OTHER; note = 2'-O-methyl nucleotide
  modified_base 9..11: mod_base = OTHER; note = 2'Fluoro nucleotide
  modified_base 12..21: mod_base = OTHER; note = 2'-O-methyl nucleotide
ggagctagccaagcagcaaat

SEQ ID NO: 309 - RNA, 21 nt, synthetic construct
  source 1..21: mol_type = other RNA
  modified_base 1..6: mod_base = OTHER; note = 2'-O-methyl nucleotide
  modified_base 1..3: mod_base = OTHER; note = Phosphorothioate linkage
  modified_base 7: mod_base = OTHER; note = 2'Fluoro nucleotide
  modified_base 8: mod_base = OTHER; note = 2'-O-methyl nucleotide
  modified_base 9..11: mod_base = OTHER; note = 2'Fluoro nucleotide
  modified_base 12..21: mod_base = OTHER; note = 2'-O-methyl nucleotide
gagctagccaagcagcaaatc

SEQ ID NO: 310 - RNA, 21 nt, synthetic construct
  source 1..21: mol_type = other RNA
  modified_base 1..6: mod_base = OTHER; note = 2'-O-methyl nucleotide
  modified_base 1..3: mod_base = OTHER; note = Phosphorothioate linkage
  modified_base 7: mod_base = OTHER; note = 2'Fluoro nucleotide
  modified_base 8: mod_base = OTHER; note = 2'-O-methyl nucleotide
  modified_base 9..11: mod_base = OTHER; note = 2'Fluoro nucleotide
  modified_base 12..21: mod_base = OTHER; note = 2'-O-methyl nucleotide
agctagccaagcagcaaatcc

SEQ ID NO: 311 - RNA, 21 nt, synthetic construct
  source 1..21: mol_type = other RNA
  modified_base 1..6: mod_base = OTHER; note = 2'-O-methyl nucleotide
  modified_base 1..3: mod_base = OTHER; note = Phosphorothioate linkage
  modified_base 7: mod_base = OTHER; note = 2'Fluoro nucleotide
  modified_base 8: mod_base = OTHER; note = 2'-O-methyl nucleotide
  modified_base 9..11: mod_base = OTHER; note = 2'Fluoro nucleotide
  modified_base 12..21: mod_base = OTHER; note = 2'-O-methyl nucleotide
gctagccaagcagcaaatcct

SEQ ID NO: 312 - RNA, 21 nt, synthetic construct
  source 1..21: mol_type = other RNA
  modified_base 1..6: mod_base = OTHER; note = 2'-O-methyl nucleotide
  modified_base 1..3: mod_base = OTHER; note = Phosphorothioate linkage
  modified_base 7: mod_base = OTHER; note = 2'Fluoro nucleotide
  modified_base 8: mod_base = OTHER; note = 2'-O-methyl nucleotide
  modified_base 9..11: mod_base = OTHER; note = 2'Fluoro nucleotide
  modified_base 12..21: mod_base = OTHER; note = 2'-O-methyl nucleotide
tagccaagcagcaaatcctgg

SEQ ID NO: 313 - RNA, 21 nt, synthetic construct
  source 1..21: mol_type = other RNA
  modified_base 1..6: mod_base = OTHER; note = 2'-O-methyl nucleotide
  modified_base 1..3: mod_base = OTHER; note = Phosphorothioate linkage
  modified_base 7: mod_base = OTHER; note = 2'Fluoro nucleotide
  modified_base 8: mod_base = OTHER; note = 2'-O-methyl nucleotide
  modified_base 9..11: mod_base = OTHER; note = 2'Fluoro nucleotide
  modified_base 12..21: mod_base = OTHER; note = 2'-O-methyl nucleotide
gccaagcagcaaatcctggat

SEQ ID NO: 314 - RNA, 21 nt, synthetic construct
  source 1..21: mol_type = other RNA
  modified_base 1..6: mod_base = OTHER; note = 2'-O-methyl nucleotide
  modified_base 1..3: mod_base = OTHER; note = Phosphorothioate linkage
  modified_base 7: mod_base = OTHER; note = 2'Fluoro nucleotide
  modified_base 8: mod_base = OTHER; note = 2'-O-methyl nucleotide
  modified_base 9..11: mod_base = OTHER; note = 2'Fluoro nucleotide
  modified_base 12..21: mod_base = OTHER; note = 2'-O-methyl nucleotide
tgaccagtcgtcccagaataa

SEQ ID NO: 315 - RNA, 21 nt, synthetic construct
  source 1..21: mol_type = other RNA
  modified_base 1..6: mod_base = OTHER; note = 2'-O-methyl nucleotide
  modified_base 1..3: mod_base = OTHER; note = Phosphorothioate linkage
  modified_base 7: mod_base = OTHER; note = 2'Fluoro nucleotide
  modified_base 8: mod_base = OTHER; note = 2'-O-methyl nucleotide
  modified_base 9..11: mod_base = OTHER; note = 2'Fluoro nucleotide
  modified_base 12..21: mod_base = OTHER; note = 2'-O-methyl nucleotide
accagtcgtcccagaataact

SEQ ID NO: 316 - RNA, 21 nt, synthetic construct
  source 1..21: mol_type = other RNA
  modified_base 1..6: mod_base = OTHER; note = 2'-O-methyl nucleotide
  modified_base 1..3: mod_base = OTHER; note = Phosphorothioate linkage
  modified_base 7: mod_base = OTHER; note = 2'Fluoro nucleotide
  modified_base 8: mod_base = OTHER; note = 2'-O-methyl nucleotide
  modified_base 9..11: mod_base = OTHER; note = 2'Fluoro nucleotide
  modified_base 12..21: mod_base = OTHER; note = 2'-O-methyl nucleotide
cgtcccagaataactcatcct

SEQ ID NO: 317 - RNA, 21 nt, synthetic construct
  source 1..21: mol_type = other RNA
  modified_base 1..6: mod_base = OTHER; note = 2'-O-methyl nucleotide
  modified_base 1..3: mod_base = OTHER; note = Phosphorothioate linkage
  modified_base 7: mod_base = OTHER; note = 2'Fluoro nucleotide
  modified_base 8: mod_base = OTHER; note = 2'-O-methyl nucleotide
  modified_base 9..11: mod_base = OTHER; note = 2'Fluoro nucleotide
  modified_base 12..21: mod_base = OTHER; note = 2'-O-methyl nucleotide
cgctgaccagagccctccgga

SEQ ID NO: 318 - RNA, 21 nt, synthetic construct
  source 1..21: mol_type = other RNA
  modified_base 1..6: mod_base = OTHER; note = 2'-O-methyl nucleotide
  modified_base 1..3: mod_base = OTHER; note = Phosphorothioate linkage
  modified_base 7: mod_base = OTHER; note = 2'Fluoro nucleotide
  modified_base 8: mod_base = OTHER; note = 2'-O-methyl nucleotide
  modified_base 9..11: mod_base = OTHER; note = 2'Fluoro nucleotide
  modified_base 12..21: mod_base = OTHER; note = 2'-O-methyl nucleotide
gctgaccagagccctccggag

SEQ ID NO: 319 - RNA, 21 nt, synthetic construct
  source 1..21: mol_type = other RNA
  modified_base 1..6: mod_base = OTHER; note = 2'-O-methyl nucleotide
  modified_base 1..3: mod_base = OTHER; note = Phosphorothioate linkage
  modified_base 7: mod_base = OTHER; note = 2'Fluoro nucleotide
  modified_base 8: mod_base = OTHER; note = 2'-O-methyl nucleotide
  modified_base 9..11: mod_base = OTHER; note = 2'Fluoro nucleotide
  modified_base 12..21: mod_base = OTHER; note = 2'-O-methyl nucleotide
ctgaccagagccctccggaga

SEQ ID NO: 320 - RNA, 21 nt, synthetic construct
  source 1..21: mol_type = other RNA
  modified_base 1..6: mod_base = OTHER; note = 2'-O-methyl nucleotide
  modified_base 1..3: mod_base = OTHER; note = Phosphorothioate linkage
  modified_base 7: mod_base = OTHER; note = 2'Fluoro nucleotide
  modified_base 8: mod_base = OTHER; note = 2'-O-methyl nucleotide
  modified_base 9..11: mod_base = OTHER; note = 2'Fluoro nucleotide
  modified_base 12..21: mod_base = OTHER; note = 2'-O-methyl nucleotide
tgaccagagccctccggagac

SEQ ID NO: 321 - RNA, 21 nt, synthetic construct
  source 1..21: mol_type = other RNA
  modified_base 1..6: mod_base = OTHER; note = 2'-O-methyl nucleotide
  modified_base 1..3: mod_base = OTHER; note = Phosphorothioate linkage
  modified_base 7: mod_base = OTHER; note = 2'Fluoro nucleotide
  modified_base 8: mod_base = OTHER; note = 2'-O-methyl nucleotide
  modified_base 9..11: mod_base = OTHER; note = 2'Fluoro nucleotide
  modified_base 12..21: mod_base = OTHER; note = 2'-O-methyl nucleotide
gaccagagccctccggagact

SEQ ID NO: 322 - RNA, 21 nt, synthetic construct
  source 1..21: mol_type = other RNA
  modified_base 1..6: mod_base = OTHER; note = 2'-O-methyl nucleotide
  modified_base 1..3: mod_base = OTHER; note = Phosphorothioate linkage
  modified_base 7: mod_base = OTHER; note = 2'Fluoro nucleotide
  modified_base 8: mod_base = OTHER; note = 2'-O-methyl nucleotide
  modified_base 9..11: mod_base = OTHER; note = 2'Fluoro nucleotide
  modified_base 12..21: mod_base = OTHER; note = 2'-O-methyl nucleotide
accagagccctccggagacta

SEQ ID NO: 323 - RNA, 21 nt, synthetic construct
  source 1..21: mol_type = other RNA
  modified_base 1..6: mod_base = OTHER; note = 2'-O-methyl nucleotide
  modified_base 1..3: mod_base = OTHER; note = Phosphorothioate linkage
  modified_base 7: mod_base = OTHER; note = 2'Fluoro nucleotide
  modified_base 8: mod_base = OTHER; note = 2'-O-methyl nucleotide
  modified_base 9..11: mod_base = OTHER; note = 2'Fluoro nucleotide
  modified_base 12..21: mod_base = OTHER; note = 2'-O-methyl nucleotide
agggaatggggaggaggtcat

SEQ ID NO: 324 - RNA, 21 nt, synthetic construct
  source 1..21: mol_type = other RNA
  modified_base 1..6: mod_base = OTHER; note = 2'-O-methyl nucleotide
  modified_base 1..3: mod_base = OTHER; note = Phosphorothioate linkage
  modified_base 7: mod_base = OTHER; note = 2'Fluoro nucleotide
  modified_base 8: mod_base = OTHER; note = 2'-O-methyl nucleotide
  modified_base 9..11: mod_base = OTHER; note = 2'Fluoro nucleotide
  modified_base 12..21: mod_base = OTHER; note = 2'-O-methyl nucleotide
aggaggtcatcagctttgcta

SEQ ID NO: 325 - RNA, 21 nt, synthetic construct
  source 1..21: mol_type = other RNA
  modified_base 1..6: mod_base = OTHER; note = 2'-O-methyl nucleotide
  modified_base 1..3: mod_base = OTHER; note = Phosphorothioate linkage
  modified_base 7: mod_base = OTHER; note = 2'Fluoro nucleotide
  modified_base 8: mod_base = OTHER; note = 2'-O-methyl nucleotide
  modified_base 9..11: mod_base = OTHER; note = 2'Fluoro nucleotide
  modified_base 12..21: mod_base = OTHER; note = 2'-O-methyl nucleotide
gaggtcatcagctttgctact

SEQ ID NO: 326 - RNA, 21 nt, synthetic construct
  source 1..21: mol_type = other RNA
  modified_base 1..6: mod_base = OTHER; note = 2'-O-methyl nucleotide
  modified_base 1..3: mod_base = OTHER; note = Phosphorothioate linkage
  modified_base 7: mod_base = OTHER; note = 2'Fluoro nucleotide
  modified_base 8: mod_base = OTHER; note = 2'-O-methyl nucleotide
  modified_base 9..11: mod_base = OTHER; note = 2'Fluoro nucleotide
  modified_base 12..21: mod_base = OTHER; note = 2'-O-methyl nucleotide
gctttgctactgtcacagact

SEQ ID NO: 327 - RNA, 21 nt, synthetic construct
  source 1..21: mol_type = other RNA
  modified_base 1..6: mod_base = OTHER; note = 2'-O-methyl nucleotide
  modified_base 1..3: mod_base = OTHER; note = Phosphorothioate linkage
  modified_base 7: mod_base = OTHER; note = 2'Fluoro nucleotide
  modified_base 8: mod_base = OTHER; note = 2'-O-methyl nucleotide
  modified_base 9..11: mod_base = OTHER; note = 2'Fluoro nucleotide
  modified_base 12..21: mod_base = OTHER; note = 2'-O-methyl nucleotide
cggtcccaccacctgtaccat

SEQ ID NO: 328 - RNA, 21 nt, synthetic construct
  source 1..21: mol_type = other RNA
  modified_base 1..6: mod_base = OTHER; note = 2'-O-methyl nucleotide
  modified_base 1..3: mod_base = OTHER; note = Phosphorothioate linkage
  modified_base 7: mod_base = OTHER; note = 2'Fluoro nucleotide
  modified_base 8: mod_base = OTHER; note = 2'-O-methyl nucleotide
  modified_base 9..11: mod_base = OTHER; note = 2'Fluoro nucleotide
  modified_base 12..21: mod_base = OTHER; note = 2'-O-methyl nucleotide
ggtcccaccacctgtaccatg

SEQ ID NO: 329 - RNA, 21 nt, synthetic construct
  source 1..21: mol_type = other RNA
  modified_base 1..6: mod_base = OTHER; note = 2'-O-methyl nucleotide
  modified_base 1..3: mod_base = OTHER; note = Phosphorothioate linkage
  modified_base 7: mod_base = OTHER; note = 2'Fluoro nucleotide
  modified_base 8: mod_base = OTHER; note = 2'-O-methyl nucleotide
  modified_base 9..11: mod_base = OTHER; note = 2'Fluoro nucleotide
  modified_base 12..21: mod_base = OTHER; note = 2'-O-methyl nucleotide
gtcccaccacctgtaccatgc

SEQ ID NO: 330 - RNA, 21 nt, synthetic construct
  source 1..21: mol_type = other RNA
  modified_base 1..6: mod_base = OTHER; note = 2'-O-methyl nucleotide
  modified_base 1..3: mod_base = OTHER; note = Phosphorothioate linkage
  modified_base 7: mod_base = OTHER; note = 2'Fluoro nucleotide
  modified_base 8: mod_base = OTHER; note = 2'-O-methyl nucleotide
  modified_base 9..11: mod_base = OTHER; note = 2'Fluoro nucleotide
  modified_base 12..21: mod_base = OTHER; note = 2'-O-methyl nucleotide
tcccaccacctgtaccatgcc

SEQ ID NO: 331 - RNA, 21 nt, synthetic construct
  source 1..21: mol_type = other RNA
  modified_base 1..6: mod_base = OTHER; note = 2'-O-methyl nucleotide
  modified_base 1..3: mod_base = OTHER; note = Phosphorothioate linkage
  modified_base 7: mod_base = OTHER; note = 2'Fluoro nucleotide
  modified_base 8: mod_base = OTHER; note = 2'-O-methyl nucleotide
  modified_base 9..11: mod_base = OTHER; note = 2'Fluoro nucleotide
  modified_base 12..21: mod_base = OTHER; note = 2'-O-methyl nucleotide
cccaccacctgtaccatgccc

SEQ ID NO: 332 - RNA, 21 nt, synthetic construct
  source 1..21: mol_type = other RNA
  modified_base 1..6: mod_base = OTHER; note = 2'-O-methyl nucleotide
  modified_base 1..3: mod_base = OTHER; note = Phosphorothioate linkage
  modified_base 7: mod_base = OTHER; note = 2'Fluoro nucleotide
  modified_base 8: mod_base = OTHER; note = 2'-O-methyl nucleotide
  modified_base 9..11: mod_base = OTHER; note = 2'Fluoro nucleotide
  modified_base 12..21: mod_base = OTHER; note = 2'-O-methyl nucleotide
ccaccacctgtaccatgcccg

SEQ ID NO: 333 - RNA, 21 nt, synthetic construct
  source 1..21: mol_type = other RNA
  modified_base 1..6: mod_base = OTHER; note = 2'-O-methyl nucleotide
  modified_base 1..3: mod_base = OTHER; note = Phosphorothioate linkage
  modified_base 7: mod_base = OTHER; note = 2'Fluoro nucleotide
  modified_base 8: mod_base = OTHER; note = 2'-O-methyl nucleotide
  modified_base 9..11: mod_base = OTHER; note = 2'Fluoro nucleotide
  modified_base 12..21: mod_base = OTHER; note = 2'-O-methyl nucleotide
caccacctgtaccatgcccgc

SEQ ID NO: 334 - RNA, 21 nt, synthetic construct
  source 1..21: mol_type = other RNA
  modified_base 1..6: mod_base = OTHER; note = 2'-O-methyl nucleotide
  modified_base 1..3: mod_base = OTHER; note = Phosphorothioate linkage
  modified_base 7: mod_base = OTHER; note = 2'Fluoro nucleotide
  modified_base 8: mod_base = OTHER; note = 2'-O-methyl nucleotide
  modified_base 9..11: mod_base = OTHER; note = 2'Fluoro nucleotide
  modified_base 12..21: mod_base = OTHER; note = 2'-O-methyl nucleotide
accacctgtaccatgcccgcc

SEQ ID NO: 335 - RNA, 21 nt, synthetic construct
  source 1..21: mol_type = other RNA
  modified_base 1..6: mod_base = OTHER; note = 2'-O-methyl nucleotide
  modified_base 1..3: mod_base = OTHER; note = Phosphorothioate linkage
  modified_base 7: mod_base = OTHER; note = 2'Fluoro nucleotide
  modified_base 8: mod_base = OTHER; note = 2'-O-methyl nucleotide
  modified_base 9..11: mod_base = OTHER; note = 2'Fluoro nucleotide
  modified_base 12..21: mod_base = OTHER; note = 2'-O-methyl nucleotide
ccacctgtaccatgcccgcct

SEQ ID NO: 336 - RNA, 21 nt, synthetic construct
  source 1..21: mol_type = other RNA
  modified_base 1..6: mod_base = OTHER; note = 2'-O-methyl nucleotide
  modified_base 1..3: mod_base = OTHER; note = Phosphorothioate linkage
  modified_base 7: mod_base = OTHER; note = 2'Fluoro nucleotide
  modified_base 8: mod_base = OTHER; note = 2'-O-methyl nucleotide
  modified_base 9..11: mod_base = OTHER; note = 2'Fluoro nucleotide
  modified_base 12..21: mod_base = OTHER; note = 2'-O-methyl nucleotide
cacctgtaccatgcccgcctg

SEQ ID NO: 337 - RNA, 21 nt, synthetic construct
  source 1..21: mol_type = other RNA
  modified_base 1..6: mod_base = OTHER; note = 2'-O-methyl nucleotide
  modified_base 1..3: mod_base = OTHER; note = Phosphorothioate linkage
  modified_base 7: mod_base = OTHER; note = 2'Fluoro nucleotide
  modified_base 8: mod_base = OTHER; note = 2'-O-methyl nucleotide
  modified_base 9..11: mod_base = OTHER; note = 2'Fluoro nucleotide
  modified_base 12..21: mod_base = OTHER; note = 2'-O-methyl nucleotide
ccacccttcctggcactcttt

SEQ ID NO: 338 - RNA, 21 nt, synthetic construct
  source 1..21: mol_type = other RNA
  modified_base 1..6: mod_base = OTHER; note = 2'-O-methyl nucleotide
  modified_base 1..3: mod_base = OTHER; note = Phosphorothioate linkage
  modified_base 7: mod_base = OTHER; note = 2'Fluoro nucleotide
  modified_base 8: mod_base = OTHER; note = 2'-O-methyl nucleotide
  modified_base 9..11: mod_base = OTHER; note = 2'Fluoro nucleotide
  modified_base 12..21: mod_base = OTHER; note = 2'-O-methyl nucleotide
cccttcctggcactctttgct

SEQ ID NO: 339 - RNA, 21 nt, synthetic construct
  source 1..21: mol_type = other RNA
  modified_base 1..6: mod_base = OTHER; note = 2'-O-methyl nucleotide
  modified_base 1..3: mod_base = OTHER; note = Phosphorothioate linkage
  modified_base 7: mod_base = OTHER; note = 2'Fluoro nucleotide
  modified_base 8: mod_base = OTHER; note = 2'-O-methyl nucleotide
  modified_base 9..11: mod_base = OTHER; note = 2'Fluoro nucleotide
  modified_base 12..21: mod_base = OTHER; note = 2'-O-methyl nucleotide
tggcactctttgcttgaggat

SEQ ID NO: 340 - RNA, 21 nt, synthetic construct
  source 1..21: mol_type = other RNA
  modified_base 1..6: mod_base = OTHER; note = 2'-O-methyl nucleotide
  modified_base 1..3: mod_base = OTHER; note = Phosphorothioate linkage
  modified_base 7: mod_base = OTHER; note = 2'Fluoro nucleotide
  modified_base 8: mod_base = OTHER; note = 2'-O-methyl nucleotide
  modified_base 9..11: mod_base = OTHER; note = 2'Fluoro nucleotide
  modified_base 12..21: mod_base = OTHER; note = 2'-O-methyl nucleotide
gcactctttgcttgaggatct

SEQ ID NO: 341 - RNA, 21 nt, synthetic construct
  source 1..21: mol_type = other RNA
  modified_base 1..6: mod_base = OTHER; note = 2'-O-methyl nucleotide
  modified_base 1..3: mod_base = OTHER; note = Phosphorothioate linkage
  modified_base 7: mod_base = OTHER; note = 2'Fluoro nucleotide
  modified_base 8: mod_base = OTHER; note = 2'-O-methyl nucleotide
  modified_base 9..11: mod_base = OTHER; note = 2'Fluoro nucleotide
  modified_base 12..21: mod_base = OTHER; note = 2'-O-methyl nucleotide
cactctttgcttgaggatctt

SEQ ID NO: 342 - RNA, 21 nt, synthetic construct
  source 1..21: mol_type = other RNA
  modified_base 1..6: mod_base = OTHER; note = 2'-O-methyl nucleotide
  modified_base 1..3: mod_base = OTHER; note = Phosphorothioate linkage
  modified_base 7: mod_base = OTHER; note = 2'Fluoro nucleotide
  modified_base 8: mod_base = OTHER; note = 2'-O-methyl nucleotide
  modified_base 9..11: mod_base = OTHER; note = 2'Fluoro nucleotide
  modified_base 12..21: mod_base = OTHER; note = 2'-O-methyl nucleotide
ctagtggcttgaggggtgaga

SEQ ID NO: 343 - RNA, 21 nt, synthetic construct
  source 1..21: mol_type = other RNA
  modified_base 1..6: mod_base = OTHER; note = 2'-O-methyl nucleotide
  modified_base 1..3: mod_base = OTHER; note = Phosphorothioate linkage
  modified_base 7: mod_base = OTHER; note = 2'Fluoro nucleotide
  modified_base 8: mod_base = OTHER; note = 2'-O-methyl nucleotide
  modified_base 9..11: mod_base = OTHER; note = 2'Fluoro nucleotide
  modified_base 12..21: mod_base = OTHER; note = 2'-O-methyl nucleotide
ggcttgaggggtgagaagtct

SEQ ID NO: 344 - RNA, 21 nt, synthetic construct
  source 1..21: mol_type = other RNA
  modified_base 1..6: mod_base = OTHER; note = 2'-O-methyl nucleotide
  modified_base 1..3: mod_base = OTHER; note = Phosphorothioate linkage
  modified_base 7: mod_base = OTHER; note = 2'Fluoro nucleotide
  modified_base 8: mod_base = OTHER; note = 2'-O-methyl nucleotide
  modified_base 9..11: mod_base = OTHER; note = 2'Fluoro nucleotide
  modified_base 12..21: mod_base = OTHER; note = 2'-O-methyl nucleotide
gaagtctggtgtcctgaaact

SEQ ID NO: 345 - RNA, 21 nt, synthetic construct
  source 1..21: mol_type = other RNA
  modified_base 1..6: mod_base = OTHER; note = 2'-O-methyl nucleotide
  modified_base 1..3: mod_base = OTHER; note = Phosphorothioate linkage
  modified_base 7: mod_base = OTHER; note = 2'Fluoro nucleotide
  modified_base 8: mod_base = OTHER; note = 2'-O-methyl nucleotide
  modified_base 9..11: mod_base = OTHER; note = 2'Fluoro nucleotide
  modified_base 12..21: mod_base = OTHER; note = 2'-O-methyl nucleotide
tggtgtcctgaaactgcaact

SEQ ID NO: 346 - RNA, 21 nt, synthetic construct
  source 1..21: mol_type = other RNA
  modified_base 1..6: mod_base = OTHER; note = 2'-O-methyl nucleotide
  modified_base 1..3: mod_base = OTHER; note = Phosphorothioate linkage
  modified_base 7: mod_base = OTHER; note = 2'Fluoro nucleotide
  modified_base 8: mod_base = OTHER; note = 2'-O-methyl nucleotide
  modified_base 9..11: mod_base = OTHER; note = 2'Fluoro nucleotide
  modified_base 12..21: mod_base = OTHER; note = 2'-O-methyl nucleotide
ggtgtcctgaaactgcaacta

SEQ ID NO: 347 - RNA, 21 nt, synthetic construct
  source 1..21: mol_type = other RNA
  modified_base 1..6: mod_base = OTHER; note = 2'-O-methyl nucleotide
  modified_base 1..3: mod_base = OTHER; note = Phosphorothioate linkage
  modified_base 7: mod_base = OTHER; note = 2'Fluoro nucleotide
  modified_base 8: mod_base = OTHER; note = 2'-O-methyl nucleotide
  modified_base 9..11: mod_base = OTHER; note = 2'Fluoro nucleotide
  modified_base 12..21: mod_base = OTHER; note = 2'-O-methyl nucleotide
cagcccttcctagagcttaag

SEQ ID NO: 348 - RNA, 21 nt, synthetic construct
  source 1..21: mol_type = other RNA
  modified_base 1..6: mod_base = OTHER; note = 2'-O-methyl nucleotide
  modified_base 1..3: mod_base = OTHER; note = Phosphorothioate linkage
  modified_base 7: mod_base = OTHER; note = 2'Fluoro nucleotide
  modified_base 8: mod_base = OTHER; note = 2'-O-methyl nucleotide
  modified_base 9..11: mod_base = OTHER; note = 2'Fluoro nucleotide
  modified_base 12..21: mod_base = OTHER; note = 2'-O-methyl nucleotide
gcccttcctagagcttaagat

SEQ ID NO: 349 - RNA, 21 nt, synthetic construct
  source 1..21: mol_type = other RNA
  modified_base 1..6: mod_base = OTHER; note = 2'-O-methyl nucleotide
  modified_base 1..3: mod_base = OTHER; note = Phosphorothioate linkage
  modified_base 7: mod_base = OTHER; note = 2'Fluoro nucleotide
  modified_base 8: mod_base = OTHER; note = 2'-O-methyl nucleotide
  modified_base 9..11: mod_base = OTHER; note = 2'Fluoro nucleotide
  modified_base 12..21: mod_base = OTHER; note = 2'-O-methyl nucleotide
gagcttaagatccgagccaat

SEQ ID NO: 350 - RNA, 21 nt, synthetic construct
  source 1..21: mol_type = other RNA
  modified_base 1..6: mod_base = OTHER; note = 2'-O-methyl nucleotide
  modified_base 1..3: mod_base = OTHER; note = Phosphorothioate linkage
  modified_base 7: mod_base = OTHER; note = 2'Fluoro nucleotide
  modified_base 8: mod_base = OTHER; note = 2'-O-methyl nucleotide
  modified_base 9..11: mod_base = OTHER; note = 2'Fluoro nucleotide
  modified_base 12..21: mod_base = OTHER; note = 2'-O-methyl nucleotide
ccattacgtagacttccagga

SEQ ID NO: 351 - RNA, 21 nt, synthetic construct
  source 1..21: mol_type = other RNA
  modified_base 1..6: mod_base = OTHER; note = 2'-O-methyl nucleotide
  modified_base 1..3: mod_base = OTHER; note = Phosphorothioate linkage
  modified_base 7: mod_base = OTHER; note = 2'Fluoro nucleotide
  modified_base 8: mod_base = OTHER; note = 2'-O-methyl nucleotide
  modified_base 9..11: mod_base = OTHER; note = 2'Fluoro nucleotide
  modified_base 12..21: mod_base = OTHER; note = 2'-O-methyl nucleotide
cccgaggggtaccagctgaat

SEQ ID NO: 352 - RNA, 21 nt, synthetic construct
  source 1..21: mol_type = other RNA
  modified_base 1..6: mod_base = OTHER; note = 2'-O-methyl nucleotide
  modified_base 1..3: mod_base = OTHER; note = Phosphorothioate linkage
  modified_base 7: mod_base = OTHER; note = 2'Fluoro nucleotide
  modified_base 8: mod_base = OTHER; note = 2'-O-methyl nucleotide
  modified_base 9..11: mod_base = OTHER; note = 2'Fluoro nucleotide
  modified_base 12..21: mod_base = OTHER; note = 2'-O-methyl nucleotide
cgaggggtaccagctgaatta

SEQ ID NO: 353 - RNA, 21 nt, synthetic construct
  source 1..21: mol_type = other RNA
  modified_base 1..6: mod_base = OTHER; note = 2'-O-methyl nucleotide
  modified_base 1..3: mod_base = OTHER; note = Phosphorothioate linkage
  modified_base 7: mod_base = OTHER; note = 2'Fluoro nucleotide
  modified_base 8: mod_base = OTHER; note = 2'-O-methyl nucleotide
  modified_base 9..11: mod_base = OTHER; note = 2'Fluoro nucleotide
  modified_base 12..21: mod_base = OTHER; note = 2'-O-methyl nucleotide
ggtaccagctgaattactgca

SEQ ID NO: 354 - RNA, 21 nt, synthetic construct
  source 1..21: mol_type = other RNA
  modified_base 1..6: mod_base = OTHER; note = 2'-O-methyl nucleotide
  modified_base 1..3: mod_base = OTHER; note = Phosphorothioate linkage
  modified_base 7: mod_base = OTHER; note = 2'Fluoro nucleotide
  modified_base 8: mod_base = OTHER; note = 2'-O-methyl nucleotide
  modified_base 9..11: mod_base = OTHER; note = 2'Fluoro nucleotide
  modified_base 12..21: mod_base = OTHER; note = 2'-O-methyl nucleotide
gtaccagctgaattactgcag

SEQ ID NO: 355 - RNA, 21 nt, synthetic construct
  source 1..21: mol_type = other RNA
  modified_base 1..6: mod_base = OTHER; note = 2'-O-methyl nucleotide
  modified_base 1..3: mod_base = OTHER; note = Phosphorothioate linkage
  modified_base 7: mod_base = OTHER; note = 2'Fluoro nucleotide
  modified_base 8: mod_base = OTHER; note = 2'-O-methyl nucleotide
  modified_base 9..11: mod_base = OTHER; note = 2'Fluoro nucleotide
  modified_base 12..21: mod_base = OTHER; note = 2'-O-methyl nucleotide
taccagctgaattactgcagt

SEQ ID NO: 356 - RNA, 21 nt, synthetic construct
  source 1..21: mol_type = other RNA
  modified_base 1..6: mod_base = OTHER; note = 2'-O-methyl nucleotide
  modified_base 1..3: mod_base = OTHER; note = Phosphorothioate linkage
  modified_base 7: mod_base = OTHER; note = 2'Fluoro nucleotide
  modified_base 8: mod_base = OTHER; note = 2'-O-methyl nucleotide
  modified_base 9..11: mod_base = OTHER; note = 2'Fluoro nucleotide
  modified_base 12..21: mod_base = OTHER; note = 2'-O-methyl nucleotide
accagctgaattactgcagtg

SEQ ID NO: 357 - RNA, 21 nt, synthetic construct
  source 1..21: mol_type = other RNA
  modified_base 1..6: mod_base = OTHER; note = 2'-O-methyl nucleotide
  modified_base 1..3: mod_base = OTHER; note = Phosphorothioate linkage
  modified_base 7: mod_base = OTHER; note = 2'Fluoro nucleotide
  modified_base 8: mod_base = OTHER; note = 2'-O-methyl nucleotide
  modified_base 9..11: mod_base = OTHER; note = 2'Fluoro nucleotide
  modified_base 12..21: mod_base = OTHER; note = 2'-O-methyl nucleotide
ccagctgaattactgcagtgg

SEQ ID NO: 358 - RNA, 21 nt, synthetic construct
  source 1..21: mol_type = other RNA
  modified_base 1..6: mod_base = OTHER; note = 2'-O-methyl nucleotide
  modified_base 1..3: mod_base = OTHER; note = Phosphorothioate linkage
  modified_base 7: mod_base = OTHER; note = 2'Fluoro nucleotide
  modified_base 8: mod_base = OTHER; note = 2'-O-methyl nucleotide
  modified_base 9..11: mod_base = OTHER; note = 2'Fluoro nucleotide
  modified_base 12..21: mod_base = OTHER; note = 2'-O-methyl nucleotide
agctgaattactgcagtgggc

SEQ ID NO: 359 - RNA, 21 nt, synthetic construct
  source 1..21: mol_type = other RNA
  modified_base 1..6: mod_base = OTHER; note = 2'-O-methyl nucleotide
  modified_base 1..3: mod_base = OTHER; note = Phosphorothioate linkage
  modified_base 7: mod_base = OTHER; note = 2'Fluoro nucleotide
  modified_base 8: mod_base = OTHER; note = 2'-O-methyl nucleotide
  modified_base 9..11: mod_base = OTHER; note = 2'Fluoro nucleotide
  modified_base 12..21: mod_base = OTHER; note = 2'-O-methyl nucleotide
gctgaattactgcagtgggca

SEQ ID NO: 360 - RNA, 21 nt, synthetic construct
  source 1..21: mol_type = other RNA
  modified_base 1..6: mod_base = OTHER; note = 2'-O-methyl nucleotide
  modified_base 1..3: mod_base = OTHER; note = Phosphorothioate linkage
  modified_base 7: mod_base = OTHER; note = 2'Fluoro nucleotide
  modified_base 8: mod_base = OTHER; note = 2'-O-methyl nucleotide
  modified_base 9..11: mod_base = OTHER; note = 2'Fluoro nucleotide
  modified_base 12..21: mod_base = OTHER; note = 2'-O-methyl nucleotide
ctgaattactgcagtgggcag

SEQ ID NO: 361 - RNA, 21 nt, synthetic construct
  source 1..21: mol_type = other RNA
  modified_base 1..6: mod_base = OTHER; note = 2'-O-methyl nucleotide
  modified_base 1..3: mod_base = OTHER; note = Phosphorothioate linkage
  modified_base 7: mod_base = OTHER; note = 2'Fluoro nucleotide
  modified_base 8: mod_base = OTHER; note = 2'-O-methyl nucleotide
  modified_base 9..11: mod_base = OTHER; note = 2'Fluoro nucleotide
  modified_base 12..21: mod_base = OTHER; note = 2'-O-methyl nucleotide
attactgcagtgggcagtgcc

SEQ ID NO: 362 - RNA, 21 nt, synthetic construct
  source 1..21: mol_type = other RNA
  modified_base 1..6: mod_base = OTHER; note = 2'-O-methyl nucleotide
  modified_base 1..3: mod_base = OTHER; note = Phosphorothioate linkage
  modified_base 7: mod_base = OTHER; note = 2'Fluoro nucleotide
  modified_base 8: mod_base = OTHER; note = 2'-O-methyl nucleotide
  modified_base 9..11: mod_base = OTHER; note = 2'Fluoro nucleotide
  modified_base 12..21: mod_base = OTHER; note = 2'-O-methyl nucleotide
ggcattgctgcctctttccat

SEQ ID NO: 363 - RNA, 21 nt, synthetic construct
  source 1..21: mol_type = other RNA
  modified_base 1..6: mod_base = OTHER; note = 2'-O-methyl nucleotide
  modified_base 1..3: mod_base = OTHER; note = Phosphorothioate linkage
  modified_base 7: mod_base = OTHER; note = 2'Fluoro nucleotide
  modified_base 8: mod_base = OTHER; note = 2'-O-methyl nucleotide
  modified_base 9..11: mod_base = OTHER; note = 2'Fluoro nucleotide
  modified_base 12..21: mod_base = OTHER; note = 2'-O-methyl nucleotide
gcattgctgcctctttccatt

SEQ ID NO: 364 - RNA, 21 nt, synthetic construct
  source 1..21: mol_type = other RNA
  modified_base 1..6: mod_base = OTHER; note = 2'-O-methyl nucleotide
  modified_base 1..3: mod_base = OTHER; note = Phosphorothioate linkage
  modified_base 7: mod_base = OTHER; note = 2'Fluoro nucleotide
  modified_base 8: mod_base = OTHER; note = 2'-O-methyl nucleotide
  modified_base 9..11: mod_base = OTHER; note = 2'Fluoro nucleotide
  modified_base 12..21: mod_base = OTHER; note = 2'-O-methyl nucleotide
ctctttccattctgccgtctt

SEQ ID NO: 365 - RNA, 21 nt, synthetic construct
  source 1..21: mol_type = other RNA
  modified_base 1..6: mod_base = OTHER; note = 2'-O-methyl nucleotide
  modified_base 1..3: mod_base = OTHER; note = Phosphorothioate linkage
  modified_base 7: mod_base = OTHER; note = 2'Fluoro nucleotide
  modified_base 8: mod_base = OTHER; note = 2'-O-methyl nucleotide
  modified_base 9..11: mod_base = OTHER; note = 2'Fluoro nucleotide
  modified_base 12..21: mod_base = OTHER; note = 2'-O-methyl nucleotide
tcagcctcctcaaagccaaca

SEQ ID NO: 366 - RNA, 21 nt, synthetic construct
  source 1..21: mol_type = other RNA
  modified_base 1..6: mod_base = OTHER; note = 2'-O-methyl nucleotide
  modified_base 1..3: mod_base = OTHER; note = Phosphorothioate linkage
  modified_base 7: mod_base = OTHER; note = 2'Fluoro nucleotide
  modified_base 8: mod_base = OTHER; note = 2'-O-methyl nucleotide
  modified_base 9..11: mod_base = OTHER; note = 2'Fluoro nucleotide
  modified_base 12..21: mod_base = OTHER; note = 2'-O-methyl nucleotide
cagcctcctcaaagccaacaa

SEQ ID NO: 367 - RNA, 21 nt, synthetic construct
  source 1..21: mol_type = other RNA
  modified_base 1..6: mod_base = OTHER; note = 2'-O-methyl nucleotide
  modified_base 1..3: mod_base = OTHER; note = Phosphorothioate linkage
  modified_base 7: mod_base = OTHER; note = 2'Fluoro nucleotide
  modified_base 8: mod_base = OTHER; note = 2'-O-methyl nucleotide
  modified_base 9..11: mod_base = OTHER; note = 2'Fluoro nucleotide
  modified_base 12..21: mod_base = OTHER; note = 2'-O-methyl nucleotide
tcctcaaagccaacaatcctt

SEQ ID NO: 368 - RNA, 21 nt, synthetic construct
  source 1..21: mol_type = other RNA
  modified_base 1..6: mod_base = OTHER; note = 2'-O-methyl nucleotide
  modified_base 1..3: mod_base = OTHER; note = Phosphorothioate linkage
  modified_base 7: mod_base = OTHER; note = 2'Fluoro nucleotide
  modified_base 8: mod_base = OTHER; note = 2'-O-methyl nucleotide
  modified_base 9..11: mod_base = OTHER; note = 2'Fluoro nucleotide
  modified_base 12..21: mod_base = OTHER; note = 2'-O-methyl nucleotide
tctctcctctacctggatcat

SEQ ID NO: 369 - RNA, 21 nt, synthetic construct
  source 1..21: mol_type = other RNA
  modified_base 1..6: mod_base = OTHER; note = 2'-O-methyl nucleotide
  modified_base 1..3: mod_base = OTHER; note = Phosphorothioate linkage
  modified_base 7: mod_base = OTHER; note = 2'Fluoro nucleotide
  modified_base 8: mod_base = OTHER; note = 2'-O-methyl nucleotide
  modified_base 9..11: mod_base = OTHER; note = 2'Fluoro nucleotide
  modified_base 12..21: mod_base = OTHER; note = 2'-O-methyl nucleotide
tctcctctacctggatcataa

SEQ ID NO: 370 - RNA, 21 nt, synthetic construct
  source 1..21: mol_type = other RNA
  modified_base 1..6: mod_base = OTHER; note = 2'-O-methyl nucleotide
  modified_base 1..3: mod_base = OTHER; note = Phosphorothioate linkage
  modified_base 7: mod_base = OTHER; note = 2'Fluoro nucleotide
  modified_base 8: mod_base = OTHER; note = 2'-O-methyl nucleotide
  modified_base 9..11: mod_base = OTHER; note = 2'Fluoro nucleotide
  modified_base 12..21: mod_base = OTHER; note = 2'-O-methyl nucleotide
ctcctctacctggatcataat

SEQ ID NO: 371 - RNA, 21 nt, synthetic construct
  source 1..21: mol_type = other RNA
  modified_base 1..6: mod_base = OTHER; note = 2'-O-methyl nucleotide
  modified_base 1..3: mod_base = OTHER; note = Phosphorothioate linkage
  modified_base 7: mod_base = OTHER; note = 2'Fluoro nucleotide
  modified_base 8: mod_base = OTHER; note = 2'-O-methyl nucleotide
  modified_base 9..11: mod_base = OTHER; note = 2'Fluoro nucleotide
  modified_base 12..21: mod_base = OTHER; note = 2'-O-methyl nucleotide
tacctggatcataatggcaat

SEQ ID NO: 372 - RNA, 21 nt, synthetic construct
  source 1..21: mol_type = other RNA
  modified_base 1..6: mod_base = OTHER; note = 2'-O-methyl nucleotide
  modified_base 1..3: mod_base = OTHER; note = Phosphorothioate linkage
  modified_base 7: mod_base = OTHER; note = 2'Fluoro nucleotide
  modified_base 8: mod_base = OTHER; note = 2'-O-methyl nucleotide
  modified_base 9..11: mod_base = OTHER; note = 2'Fluoro nucleotide
  modified_base 12..21: mod_base = OTHER; note = 2'-O-methyl nucleotide
cctggatcataatggcaatgt

SEQ ID NO: 373 - RNA, 21 nt, synthetic construct
  source 1..21: mol_type = other RNA
  modified_base 1..6: mod_base = OTHER; note = 2'-O-methyl nucleotide
  modified_base 1..3: mod_base = OTHER; note = Phosphorothioate linkage
  modified_base 7: mod_base = OTHER; note = 2'Fluoro nucleotide
  modified_base 8: mod_base = OTHER; note = 2'-O-methyl nucleotide
  modified_base 9..11: mod_base = OTHER; note = 2'Fluoro nucleotide
  modified_base 12..21: mod_base = OTHER; note = 2'-O-methyl nucleotide
atcataatggcaatgtggtca

SEQ ID NO: 374 - RNA, 21 nt, synthetic construct
  source 1..21: mol_type = other RNA
  modified_base 1..6: mod_base = OTHER; note = 2'-O-methyl nucleotide
  modified_base 1..3: mod_base = OTHER; note = Phosphorothioate linkage
  modified_base 7: mod_base = OTHER; note = 2'Fluoro nucleotide
  modified_base 8: mod_base = OTHER; note = 2'-O-methyl nucleotide
  modified_base 9..11: mod_base = OTHER; note = 2'Fluoro nucleotide
  modified_base 12..21: mod_base = OTHER; note = 2'-O-methyl nucleotide
tcataatggcaatgtggtcaa

SEQ ID NO: 375 - RNA, 21 nt, synthetic construct
  source 1..21: mol_type = other RNA
  modified_base 1..6: mod_base = OTHER; note = 2'-O-methyl nucleotide
  modified_base 1..3: mod_base = OTHER; note = Phosphorothioate linkage
  modified_base 7: mod_base = OTHER; note = 2'Fluoro nucleotide
  modified_base 8: mod_base = OTHER; note = 2'-O-methyl nucleotide
  modified_base 9..11: mod_base = OTHER; note = 2'Fluoro nucleotide
  modified_base 12..21: mod_base = OTHER; note = 2'-O-methyl nucleotide
cataatggcaatgtggtcaag

SEQ ID NO: 376 - RNA, 21 nt, synthetic construct
  source 1..21: mol_type = other RNA
  modified_base 1..6: mod_base = OTHER; note = 2'-O-methyl nucleotide
  modified_base 1..3: mod_base = OTHER; note = Phosphorothioate linkage
  modified_base 7: mod_base = OTHER; note = 2'Fluoro nucleotide
  modified_base 8: mod_base = OTHER; note = 2'-O-methyl nucleotide
  modified_base 9..11: mod_base = OTHER; note = 2'Fluoro nucleotide
  modified_base 12..21: mod_base = OTHER; note = 2'-O-methyl nucleotide
ataatggcaatgtggtcaaga

SEQ ID NO: 377 - RNA, 21 nt, synthetic construct
  source 1..21: mol_type = other RNA
  modified_base 1..6: mod_base = OTHER; note = 2'-O-methyl nucleotide
  modified_base 1..3: mod_base = OTHER; note = Phosphorothioate linkage
  modified_base 7: mod_base = OTHER; note = 2'Fluoro nucleotide
  modified_base 8: mod_base = OTHER; note = 2'-O-methyl nucleotide
  modified_base 9..11: mod_base = OTHER; note = 2'Fluoro nucleotide
  modified_base 12..21: mod_base = OTHER; note = 2'-O-methyl nucleotide
taatggcaatgtggtcaagac

SEQ ID NO: 378 - RNA, 21 nt, synthetic construct
  source 1..21: mol_type = other RNA
  modified_base 1..6: mod_base = OTHER; note = 2'-O-methyl nucleotide
  modified_base 1..3: mod_base = OTHER; note = Phosphorothioate linkage
  modified_base 7: mod_base = OTHER; note = 2'Fluoro nucleotide
  modified_base 8: mod_base = OTHER; note = 2'-O-methyl nucleotide
  modified_base 9..11: mod_base = OTHER; note = 2'Fluoro nucleotide
  modified_base 12..21: mod_base = OTHER; note = 2'-O-methyl nucleotide
aatggcaatgtggtcaagacg

SEQ ID NO: 379 - RNA, 21 nt, synthetic construct
  source 1..21: mol_type = other RNA
  modified_base 1..6: mod_base = OTHER; note = 2'-O-methyl nucleotide
  modified_base 1..3: mod_base = OTHER; note = Phosphorothioate linkage
  modified_base 7: mod_base = OTHER; note = 2'Fluoro nucleotide
  modified_base 8: mod_base = OTHER; note = 2'-O-methyl nucleotide
  modified_base 9..11: mod_base = OTHER; note = 2'Fluoro nucleotide
  modified_base 12..21: mod_base = OTHER; note = 2'-O-methyl nucleotide
caatgtggtcaagacggatgt

SEQ ID NO: 380 - RNA, 21 nt, synthetic construct
  source 1..21: mol_type = other RNA
  modified_base 1..6: mod_base = OTHER; note = 2'-O-methyl nucleotide
  modified_base 1..3: mod_base = OTHER; note = Phosphorothioate linkage
  modified_base 7: mod_base = OTHER; note = 2'Fluoro nucleotide
  modified_base 8: mod_base = OTHER; note = 2'-O-methyl nucleotide
  modified_base 9..11: mod_base = OTHER; note = 2'Fluoro nucleotide
  modified_base 12..21: mod_base = OTHER; note = 2'-O-methyl nucleotide
caagacggatgtgccagatat

SEQ ID NO: 381 - RNA, 21 nt, synthetic construct
  source 1..21: mol_type = other RNA
  modified_base 1..6: mod_base = OTHER; note = 2'-O-methyl nucleotide
  modified_base 1..3: mod_base = OTHER; note = Phosphorothioate linkage
  modified_base 7: mod_base = OTHER; note = 2'Fluoro nucleotide
  modified_base 8: mod_base = OTHER; note = 2'-O-methyl nucleotide
  modified_base 9..11: mod_base = OTHER; note = 2'Fluoro nucleotide
  modified_base 12..21: mod_base = OTHER; note = 2'-O-methyl nucleotide
gaggcctgtggctgcagctag

SEQ ID NO: 382 - RNA, 21 nt, synthetic construct
  source 1..21: mol_type = other RNA
  modified_base 1..6: mod_base = OTHER; note = 2'-O-methyl nucleotide
  modified_base 1..3: mod_base = OTHER; note = Phosphorothioate linkage
  modified_base 7: mod_base = OTHER; note = 2'Fluoro nucleotide
  modified_base 8: mod_base = OTHER; note = 2'-O-methyl nucleotide
  modified_base 9..11: mod_base = OTHER; note = 2'Fluoro nucleotide
  modified_base 12..21: mod_base = OTHER; note = 2'-O-methyl nucleotide
aggcctgtggctgcagctagc

SEQ ID NO: 383 - RNA, 21 nt, synthetic construct
  source 1..21: mol_type = other RNA
  modified_base 1..6: mod_base = OTHER; note = 2'-O-methyl nucleotide
  modified_base 1..3: mod_base = OTHER; note = Phosphorothioate linkage
  modified_base 7: mod_base = OTHER; note = 2'Fluoro nucleotide
  modified_base 8: mod_base = OTHER; note = 2'-O-methyl nucleotide
  modified_base 9..11: mod_base = OTHER; note = 2'Fluoro nucleotide
  modified_base 12..21: mod_base = OTHER; note = 2'-O-methyl nucleotide
ggcctgtggctgcagctagca

SEQ ID NO: 384 - RNA, 21 nt, synthetic construct
  source 1..21: mol_type = other RNA
  modified_base 1..6: mod_base = OTHER; note = 2'-O-methyl nucleotide
  modified_base 1..3: mod_base = OTHER; note = Phosphorothioate linkage
  modified_base 7: mod_base = OTHER; note = 2'Fluoro nucleotide
  modified_base 8: mod_base = OTHER; note = 2'-O-methyl nucleotide
  modified_base 9..11: mod_base = OTHER; note = 2'Fluoro nucleotide
  modified_base 12..21: mod_base = OTHER; note = 2'-O-methyl nucleotide
gcctgtggctgcagctagcaa

SEQ ID NO: 385 - RNA, 21 nt, synthetic construct
  source 1..21: mol_type = other RNA
  modified_base 1..6: mod_base = OTHER; note = 2'-O-methyl nucleotide
  modified_base 1..3: mod_base = OTHER; note = Phosphorothioate linkage
  modified_base 7: mod_base = OTHER; note = 2'Fluoro nucleotide
  modified_base 8: mod_base = OTHER; note = 2'-O-methyl nucleotide
  modified_base 9..11: mod_base = OTHER; note = 2'Fluoro nucleotide
  modified_base 12..21: mod_base = OTHER; note = 2'-O-methyl nucleotide
cctgtggctgcagctagcaag

SEQ ID NO: 386 - RNA, 21 nt, synthetic construct
  source 1..21: mol_type = other RNA
  modified_base 1..6: mod_base = OTHER; note = 2'-O-methyl nucleotide
  modified_base 1..3: mod_base = OTHER; note = Phosphorothioate linkage
  modified_base 7: mod_base = OTHER; note = 2'Fluoro nucleotide
  modified_base 8: mod_base = OTHER; note = 2'-O-methyl nucleotide
  modified_base 9..11: mod_base = OTHER; note = 2'Fluoro nucleotide
  modified_base 12..21: mod_base = OTHER; note = 2'-O-methyl nucleotide
gctttggagtgaagagaccaa

SEQ ID NO: 387 - RNA, 21 nt, synthetic construct
  source 1..21: mol_type = other RNA
  modified_base 1..6: mod_base = OTHER; note = 2'-O-methyl nucleotide
  modified_base 1..3: mod_base = OTHER; note = Phosphorothioate linkage
  modified_base 7: mod_base = OTHER; note = 2'Fluoro nucleotide
  modified_base 8: mod_base = OTHER; note = 2'-O-methyl nucleotide
  modified_base 9..11: mod_base = OTHER; note = 2'Fluoro nucleotide
  modified_base 12..21: mod_base = OTHER; note = 2'-O-methyl nucleotide
caaccacctggcaatatgact

SEQ ID NO: 388 - RNA, 21 nt, synthetic construct
  source 1..21: mol_type = other RNA
  modified_base 1..6: mod_base = OTHER; note = 2'-O-methyl nucleotide
  modified_base 1..3: mod_base = OTHER; note = Phosphorothioate linkage
  modified_base 7: mod_base = OTHER; note = 2'Fluoro nucleotide
  modified_base 8: mod_base = OTHER; note = 2'-O-methyl nucleotide
  modified_base 9..11: mod_base = OTHER; note = 2'Fluoro nucleotide
  modified_base 12..21: mod_base = OTHER; note = 2'-O-methyl nucleotide
accacctggcaatatgactca

SEQ ID NO: 389 - RNA, 21 nt, synthetic construct
  source 1..21: mol_type = other RNA
  modified_base 1..6: mod_base = OTHER; note = 2'-O-methyl nucleotide
  modified_base 1..3: mod_base = OTHER; note = Phosphorothioate linkage
  modified_base 7: mod_base = OTHER; note = 2'Fluoro nucleotide
  modified_base 8: mod_base = OTHER; note = 2'-O-methyl nucleotide
  modified_base 9..11: mod_base = OTHER; note = 2'Fluoro nucleotide
  modified_base 12..21: mod_base = OTHER; note = 2'-O-methyl nucleotide
cacctggcaatatgactcact

SEQ ID NO: 390 - RNA, 21 nt, synthetic construct
  source 1..21: mol_type = other RNA
  modified_base 1..6: mod_base = OTHER; note = 2'-O-methyl nucleotide
  modified_base 1..3: mod_base = OTHER; note = Phosphorothioate linkage
  modified_base 7: mod_base = OTHER; note = 2'Fluoro nucleotide
  modified_base 8: mod_base = OTHER; note = 2'-O-methyl nucleotide
  modified_base 9..11: mod_base = OTHER; note = 2'Fluoro nucleotide
  modified_base 12..21: mod_base = OTHER; note = 2'-O-methyl nucleotide
ggacccaaatgggcactttct

SEQ ID NO: 391 - RNA, 21 nt, synthetic construct
  source 1..21: mol_type = other RNA
  modified_base 1..6: mod_base = OTHER; note = 2'-O-methyl nucleotide
  modified_base 1..3: mod_base = OTHER; note = Phosphorothioate linkage
  modified_base 7: mod_base = OTHER; note = 2'Fluoro nucleotide
  modified_base 8: mod_base = OTHER; note = 2'-O-methyl nucleotide
  modified_base 9..11: mod_base = OTHER; note = 2'Fluoro nucleotide
  modified_base 12..21: mod_base = OTHER; note = 2'-O-methyl nucleotide
cccaaatgggcactttcttgt

SEQ ID NO: 392 - RNA, 21 nt, synthetic construct
  source 1..21: mol_type = other RNA
  modified_base 1..6: mod_base = OTHER; note = 2'-O-methyl nucleotide
  modified_base 1..3: mod_base = OTHER; note = Phosphorothioate linkage
  modified_base 7: mod_base = OTHER; note = 2'Fluoro nucleotide
  modified_base 8: mod_base = OTHER; note = 2'-O-methyl nucleotide
  modified_base 9..11: mod_base = OTHER; note = 2'Fluoro nucleotide
  modified_base 12..21: mod_base = OTHER; note = 2'-O-methyl nucleotide
caaatgggcactttcttgtct

SEQ ID NO: 393 - RNA, 21 nt, synthetic construct
  source 1..21: mol_type = other RNA
  modified_base 1..6: mod_base = OTHER; note = 2'-O-methyl nucleotide
  modified_base 1..3: mod_base = OTHER; note = Phosphorothioate linkage
  modified_base 7: mod_base = OTHER; note = 2'Fluoro nucleotide
  modified_base 8: mod_base = OTHER; note = 2'-O-methyl nucleotide
  modified_base 9..11: mod_base = OTHER; note = 2'Fluoro nucleotide
  modified_base 12..21: mod_base = OTHER; note = 2'-O-methyl nucleotide
ggcactttcttgtctgagact

SEQ ID NO: 394 - RNA, 21 nt, synthetic construct
  source 1..21: mol_type = other RNA
  modified_base 1..6: mod_base = OTHER; note = 2'-O-methyl nucleotide
  modified_base 1..3: mod_base = OTHER; note = Phosphorothioate linkage
  modified_base 7: mod_base = OTHER; note = 2'Fluoro nucleotide
  modified_base 8: mod_base = OTHER; note = 2'-O-methyl nucleotide
  modified_base 9..11: mod_base = OTHER; note = 2'Fluoro nucleotide
  modified_base 12..21: mod_base = OTHER; note = 2'-O-methyl nucleotide
cactttcttgtctgagactct

SEQ ID NO: 395 - RNA, 21 nt, synthetic construct
  source 1..21: mol_type = other RNA
  modified_base 1..6: mod_base = OTHER; note = 2'-O-methyl nucleotide
  modified_base 1..3: mod_base = OTHER; note = Phosphorothioate linkage
  modified_base 7: mod_base = OTHER; note = 2'Fluoro nucleotide
  modified_base 8: mod_base = OTHER; note = 2'-O-methyl nucleotide
  modified_base 9..11: mod_base = OTHER; note = 2'Fluoro nucleotide
  modified_base 12..21: mod_base = OTHER; note = 2'-O-methyl nucleotide
cttgtctgagactctggctta

SEQ ID NO: 396 - RNA, 21 nt, synthetic construct
  source 1..21: mol_type = other RNA
  modified_base 1..6: mod_base = OTHER; note = 2'-O-methyl nucleotide
  modified_base 1..3: mod_base = OTHER; note = Phosphorothioate linkage
  modified_base 7: mod_base = OTHER; note = 2'Fluoro nucleotide
  modified_base 8: mod_base = OTHER; note = 2'-O-methyl nucleotide
  modified_base 9..11: mod_base = OTHER; note = 2'Fluoro nucleotide
  modified_base 12..21: mod_base = OTHER; note = 2'-O-methyl nucleotide
agggaaggcagagaaaaatta

SEQ ID NO: 397 - RNA, 21 nt, synthetic construct
  source 1..21: mol_type = other RNA
  modified_base 1..6: mod_base = OTHER; note = 2'-O-methyl nucleotide
  modified_base 1..3: mod_base = OTHER; note = Phosphorothioate linkage
  modified_base 7: mod_base = OTHER; note = 2'Fluoro nucleotide
  modified_base 8: mod_base = OTHER; note = 2'-O-methyl nucleotide
  modified_base 9..11: mod_base = OTHER; note = 2'Fluoro nucleotide
  modified_base 12..21: mod_base = OTHER; note = 2'-O-methyl nucleotide
gggaaggcagagaaaaattac

SEQ ID NO: 398 - RNA, 21 nt, synthetic construct
  source 1..21: mol_type = other RNA
  modified_base 1..6: mod_base = OTHER; note = 2'-O-methyl nucleotide
  modified_base 1..3: mod_base = OTHER; note = Phosphorothioate linkage
  modified_base 7: mod_base = OTHER; note = 2'Fluoro nucleotide
  modified_base 8: mod_base = OTHER; note = 2'-O-methyl nucleotide
  modified_base 9..11: mod_base = OTHER; note = 2'Fluoro nucleotide
  modified_base 12..21: mod_base = OTHER; note = 2'-O-methyl nucleotide
agcctctcccaagatgagaaa

SEQ ID NO: 399 - RNA, 21 nt, synthetic construct
  source 1..21: mol_type = other RNA
  modified_base 1..6: mod_base = OTHER; note = 2'-O-methyl nucleotide
  modified_base 1..3: mod_base = OTHER; note = Phosphorothioate linkage
  modified_base 7: mod_base = OTHER; note = 2'Fluoro nucleotide
  modified_base 8: mod_base = OTHER; note = 2'-O-methyl nucleotide
  modified_base 9..11: mod_base = OTHER; note = 2'Fluoro nucleotide
  modified_base 12..21: mod_base = OTHER; note = 2'-O-methyl nucleotide
cctctcccaagatgagaaagt

SEQ ID NO: 400 - RNA, 21 nt, synthetic construct
  source 1..21: mol_type = other RNA
  modified_base 1..6: mod_base = OTHER; note = 2'-O-methyl nucleotide
  modified_base 1..3: mod_base = OTHER; note = Phosphorothioate linkage
  modified_base 7: mod_base = OTHER; note = 2'Fluoro nucleotide
  modified_base 8: mod_base = OTHER; note = 2'-O-methyl nucleotide
  modified_base 9..11: mod_base = OTHER; note = 2'Fluoro nucleotide
  modified_base 12..21: mod_base = OTHER; note = 2'-O-methyl nucleotide
ctcccaagatgagaaagtcct

SEQ ID NO: 401 - RNA, 21 nt, synthetic construct
  source 1..21: mol_type = other RNA
  modified_base 1..6: mod_base = OTHER; note = 2'-O-methyl nucleotide
  modified_base 1..3: mod_base = OTHER; note = Phosphorothioate linkage
  modified_base 7: mod_base = OTHER; note = 2'Fluoro nucleotide
  modified_base 8: mod_base = OTHER; note = 2'-O-methyl nucleotide
  modified_base 9..11: mod_base = OTHER; note = 2'Fluoro nucleotide
  modified_base 12..21: mod_base = OTHER; note = 2'-O-methyl nucleotide
ggggaggaggaagcagataga

SEQ ID NO: 402 - RNA, 21 nt, synthetic construct
  source 1..21: mol_type = other RNA
  modified_base 1..6: mod_base = OTHER; note = 2'-O-methyl nucleotide
  modified_base 1..3: mod_base = OTHER; note = Phosphorothioate linkage
  modified_base 7: mod_base = OTHER; note = 2'Fluoro nucleotide
  modified_base 8: mod_base = OTHER; note = 2'-O-methyl nucleotide
  modified_base 9..11: mod_base = OTHER; note = 2'Fluoro nucleotide
  modified_base 12..21: mod_base = OTHER; note = 2'-O-methyl nucleotide
gggaggaggaagcagatagat

SEQ ID NO: 403 - RNA, 21 nt, synthetic construct
  source 1..21: mol_type = other RNA
  modified_base 1..6: mod_base = OTHER; note = 2'-O-methyl nucleotide
  modified_base 1..3: mod_base = OTHER; note = Phosphorothioate linkage
  modified_base 7: mod_base = OTHER; note = 2'Fluoro nucleotide
  modified_base 8: mod_base = OTHER; note = 2'-O-methyl nucleotide
  modified_base 9..11: mod_base = OTHER; note = 2'Fluoro nucleotide
  modified_base 12..21: mod_base = OTHER; note = 2'-O-methyl nucleotide
cagaaacaggagtcaggaaaa

SEQ ID NO: 404 - RNA, 21 nt, synthetic construct
  source 1..21: mol_type = other RNA
  modified_base 1..6: mod_base = OTHER; note = 2'-O-methyl nucleotide
  modified_base 1..3: mod_base = OTHER; note = Phosphorothioate linkage
  modified_base 7: mod_base = OTHER; note = 2'Fluoro nucleotide
  modified_base 8: mod_base = OTHER; note = 2'-O-methyl nucleotide
  modified_base 9..11: mod_base = OTHER; note = 2'Fluoro nucleotide
  modified_base 12..21: mod_base = OTHER; note = 2'-O-methyl nucleotide
gcactaagcctaagaagttcc

SEQ ID NO: 405 - RNA, 21 nt, synthetic construct
  source 1..21: mol_type = other RNA
  modified_base 1..6: mod_base = OTHER; note = 2'-O-methyl nucleotide
  modified_base 1..3: mod_base = OTHER; note = Phosphorothioate linkage
  modified_base 7: mod_base = OTHER; note = 2'Fluoro nucleotide
  modified_base 8: mod_base = OTHER; note = 2'-O-methyl nucleotide
  modified_base 9..11: mod_base = OTHER; note = 2'Fluoro nucleotide
  modified_base 12..21: mod_base = OTHER; note = 2'-O-methyl nucleotide
cccactgggagacaagcattt

SEQ ID NO: 406 - RNA, 21 nt, synthetic construct
  source 1..21: mol_type = other RNA
  modified_base 1..6: mod_base = OTHER; note = 2'-O-methyl nucleotide
  modified_base 1..3: mod_base = OTHER; note = Phosphorothioate linkage
  modified_base 7: mod_base = OTHER; note = 2'Fluoro nucleotide
  modified_base 8: mod_base = OTHER; note = 2'-O-methyl nucleotide
  modified_base 9..11: mod_base = OTHER; note = 2'Fluoro nucleotide
  modified_base 12..21: mod_base = OTHER; note = 2'-O-methyl nucleotide
ccactgggagacaagcattta

SEQ ID NO: 407 - RNA, 21 nt, synthetic construct
  source 1..21: mol_type = other RNA
  modified_base 1..6: mod_base = OTHER; note = 2'-O-methyl nucleotide
  modified_base 1..3: mod_base = OTHER; note = Phosphorothioate linkage
  modified_base 7: mod_base = OTHER; note = 2'Fluoro nucleotide
  modified_base 8: mod_base = OTHER; note = 2'-O-methyl nucleotide
  modified_base 9..11: mod_base = OTHER; note = 2'Fluoro nucleotide
  modified_base 12..21: mod_base = OTHER; note = 2'-O-methyl nucleotide
actgggagacaagcatttata

SEQ ID NO: 408 - RNA, 21 nt, synthetic construct
  source 1..21: mol_type = other RNA
  modified_base 1..6: mod_base = OTHER; note = 2'-O-methyl nucleotide
  modified_base 1..3: mod_base = OTHER; note = Phosphorothioate linkage
  modified_base 7: mod_base = OTHER; note = 2'Fluoro nucleotide
  modified_base 8: mod_base = OTHER; note = 2'-O-methyl nucleotide
  modified_base 9..11: mod_base = OTHER; note = 2'Fluoro nucleotide
  modified_base 12..21: mod_base = OTHER; note = 2'-O-methyl nucleotide
tgggagacaagcatttatact

SEQ ID NO: 409 - RNA, 21 nt, synthetic construct
  source 1..21: mol_type = other RNA
  modified_base 1..6: mod_base = OTHER; note = 2'-O-methyl nucleotide
  modified_base 1..3: mod_base = OTHER; note = Phosphorothioate linkage
  modified_base 7: mod_base = OTHER; note = 2'Fluoro nucleotide
  modified_base 8: mod_base = OTHER; note = 2'-O-methyl nucleotide
  modified_base 9..11: mod_base = OTHER; note = 2'Fluoro nucleotide
  modified_base 12..21: mod_base = OTHER; note = 2'-O-methyl nucleotide
gggagacaagcatttatactt

SEQ ID NO: 410 - RNA, 21 nt, synthetic construct
  source 1..21: mol_type = other RNA
  modified_base 1..6: mod_base = OTHER; note = 2'-O-methyl nucleotide
  modified_base 1..3: mod_base = OTHER; note = Phosphorothioate linkage
  modified_base 7: mod_base = OTHER; note = 2'Fluoro nucleotide
  modified_base 8: mod_base = OTHER; note = 2'-O-methyl nucleotide
  modified_base 9..11: mod_base = OTHER; note = 2'Fluoro nucleotide
  modified_base 12..21: mod_base = OTHER; note = 2'-O-methyl nucleotide
gacaagcatttatactttctt

SEQ ID NO: 411 - RNA, 21 nt, synthetic construct
  source 1..21: mol_type = other RNA
  modified_base 1..6: mod_base = OTHER; note = 2'-O-methyl nucleotide
  modified_base 1..3: mod_base = OTHER; note = Phosphorothioate linkage
  modified_base 7: mod_base = OTHER; note = 2'Fluoro nucleotide
  modified_base 8: mod_base = OTHER; note = 2'-O-methyl nucleotide
  modified_base 9..11: mod_base = OTHER; note = 2'Fluoro nucleotide
  modified_base 12..21: mod_base = OTHER; note = 2'-O-methyl nucleotide
gagccaccgcgcctggcttat

SEQ ID NO: 412 - RNA, 21 nt, synthetic construct
  source 1..21: mol_type = other RNA
  modified_base 1..6: mod_base = OTHER; note = 2'-O-methyl nucleotide
  modified_base 1..3: mod_base = OTHER; note = Phosphorothioate linkage
  modified_base 7: mod_base = OTHER; note = 2'Fluoro nucleotide
  modified_base 8: mod_base = OTHER; note = 2'-O-methyl nucleotide
  modified_base 9..11: mod_base = OTHER; note = 2'Fluoro nucleotide
  modified_base 12..21: mod_base = OTHER; note = 2'-O-methyl nucleotide
ccaccgcgcctggcttatact

SEQ ID NO: 413 - RNA, 21 nt, synthetic construct
  source 1..21: mol_type = other RNA
  modified_base 1..6: mod_base = OTHER; note = 2'-O-methyl nucleotide
  modified_base 1..3: mod_base = OTHER; note = Phosphorothioate linkage
  modified_base 7: mod_base = OTHER; note = 2'Fluoro nucleotide
  modified_base 8: mod_base = OTHER; note = 2'-O-methyl nucleotide
  modified_base 9..11: mod_base = OTHER; note = 2'Fluoro nucleotide
  modified_base 12..21: mod_base = OTHER; note = 2'-O-methyl nucleotide
accgcgcctggcttatacttt

SEQ ID NO: 414 - RNA, 21 nt, synthetic construct
  source 1..21: mol_type = other RNA
  modified_base 1..6: mod_base = OTHER; note = 2'-O-methyl nucleotide
  modified_base 1..3: mod_base = OTHER; note = Phosphorothioate linkage
  modified_base 7: mod_base = OTHER; note = 2'Fluoro nucleotide
  modified_base 8: mod_base = OTHER; note = 2'-O-methyl nucleotide
  modified_base 9..11: mod_base = OTHER; note = 2'Fluoro nucleotide
  modified_base 12..21: mod_base = OTHER; note = 2'-O-methyl nucleotide
cgcgcctggcttatactttct

SEQ ID NO: 415 - RNA, 21 nt, synthetic construct
  source 1..21: mol_type = other RNA
  modified_base 1..6: mod_base = OTHER; note = 2'-O-methyl nucleotide
  modified_base 1..3: mod_base = OTHER; note = Phosphorothioate linkage
  modified_base 7: mod_base = OTHER; note = 2'Fluoro nucleotide
  modified_base 8: mod_base = OTHER; note = 2'-O-methyl nucleotide
  modified_base 9..11: mod_base = OTHER; note = 2'Fluoro nucleotide
  modified_base 12..21: mod_base = OTHER; note = 2'-O-methyl nucleotide
gcgcctggcttatactttctt

SEQ ID NO: 416 - RNA, 21 nt, synthetic construct
  source 1..21: mol_type = other RNA
  modified_base 1..6: mod_base = OTHER; note = 2'-O-methyl nucleotide
  modified_base 1..3: mod_base = OTHER; note = Phosphorothioate linkage
  modified_base 7: mod_base = OTHER; note = 2'Fluoro nucleotide
  modified_base 8: mod_base = OTHER; note = 2'-O-methyl nucleotide
  modified_base 9..11: mod_base = OTHER; note = 2'Fluoro nucleotide
  modified_base 12..21: mod_base = OTHER; note = 2'-O-methyl nucleotide
cgcctggcttatactttctta

SEQ ID NO: 417 - RNA, 21 nt, synthetic construct
  source 1..21: mol_type = other RNA
  modified_base 1..6: mod_base = OTHER; note = 2'-O-methyl nucleotide
  modified_base 1..3: mod_base = OTHER; note = Phosphorothioate linkage
  modified_base 7: mod_base = OTHER; note = 2'Fluoro nucleotide
  modified_base 8: mod_base = OTHER; note = 2'-O-methyl nucleotide
  modified_base 9..11: mod_base = OTHER; note = 2'Fluoro nucleotide
  modified_base 12..21: mod_base = OTHER; note = 2'-O-methyl nucleotide
gcctggcttatactttcttaa

SEQ ID NO: 418 - RNA, 21 nt, synthetic construct
  source 1..21: mol_type = other RNA
  modified_base 1..6: mod_base = OTHER; note = 2'-O-methyl nucleotide
  modified_base 1..3: mod_base = OTHER; note = Phosphorothioate linkage
  modified_base 7: mod_base = OTHER; note = 2'Fluoro nucleotide
  modified_base 8: mod_base = OTHER; note = 2'-O-methyl nucleotide
  modified_base 9..11: mod_base = OTHER; note = 2'Fluoro nucleotide
  modified_base 12..21: mod_base = OTHER; note = 2'-O-methyl nucleotide
cctggcttatactttcttaat

SEQ ID NO: 419 - RNA, 21 nt, synthetic construct
  source 1..21: mol_type = other RNA
  modified_base 1..6: mod_base = OTHER; note = 2'-O-methyl nucleotide
  modified_base 1..3: mod_base = OTHER; note = Phosphorothioate linkage
  modified_base 7: mod_base = OTHER; note = 2'Fluoro nucleotide
  modified_base 8: mod_base = OTHER; note = 2'-O-methyl nucleotide
  modified_base 9..11: mod_base = OTHER; note = 2'Fluoro nucleotide
  modified_base 12..21: mod_base = OTHER; note = 2'-O-methyl nucleotide
tggcttatactttcttaataa

SEQ ID NO: 420 - RNA, 21 nt, synthetic construct
  source 1..21: mol_type = other RNA
  modified_base 1..6: mod_base = OTHER; note = 2'-O-methyl nucleotide
  modified_base 1..3: mod_base = OTHER; note = Phosphorothioate linkage
  modified_base 7: mod_base = OTHER; note = 2'Fluoro nucleotide
  modified_base 8: mod_base = OTHER; note = 2'-O-methyl nucleotide
  modified_base 9..11: mod_base = OTHER; note = 2'Fluoro nucleotide
  modified_base 12..21: mod_base = OTHER; note = 2'-O-methyl nucleotide
ggcttatactttcttaataaa

SEQ ID NO: 421 - RNA, 21 nt, synthetic construct
  source 1..21: mol_type = other RNA
  modified_base 1..6: mod_base = OTHER; note = 2'-O-methyl nucleotide
  modified_base 1..3: mod_base = OTHER; note = Phosphorothioate linkage
  modified_base 7: mod_base = OTHER; note = 2'Fluoro nucleotide
  modified_base 8: mod_base = OTHER; note = 2'-O-methyl nucleotide
  modified_base 9..11: mod_base = OTHER; note = 2'Fluoro nucleotide
  modified_base 12..21: mod_base = OTHER; note = 2'-O-methyl nucleotide
cttatactttcttaataaaaa

SEQ ID NO: 422 - RNA, 21 nt, synthetic construct
  source 1..21: mol_type = other RNA
  modified_base 1..6: mod_base = OTHER; note = 2'-O-methyl nucleotide
  modified_base 1..3: mod_base = OTHER; note = Phosphorothioate linkage
  modified_base 7: mod_base = OTHER; note = 2'Fluoro nucleotide
  modified_base 8: mod_base = OTHER; note = 2'-O-methyl nucleotide
  modified_base 9..11: mod_base = OTHER; note = 2'Fluoro nucleotide
  modified_base 12..21: mod_base = OTHER; note = 2'-O-methyl nucleotide
aggggtgtccacaaagtcaaa

SEQ ID NO: 423 - RNA, 21 nt, synthetic construct
  source 1..21: mol_type = other RNA
  modified_base 1..6: mod_base = OTHER; note = 2'-O-methyl nucleotide
  modified_base 1..3: mod_base = OTHER; note = Phosphorothioate linkage
  modified_base 7: mod_base = OTHER; note = 2'Fluoro nucleotide
  modified_base 8: mod_base = OTHER; note = 2'-O-methyl nucleotide
  modified_base 9..11: mod_base = OTHER; note = 2'Fluoro nucleotide
  modified_base 12..21: mod_base = OTHER; note = 2'-O-methyl nucleotide
ggggtgtccacaaagtcaaag

SEQ ID NO: 424 - RNA, 21 nt, synthetic construct
  source 1..21: mol_type = other RNA
  modified_base 1..6: mod_base = OTHER; note = 2'-O-methyl nucleotide
  modified_base 1..3: mod_base = OTHER; note = Phosphorothioate linkage
  modified_base 7: mod_base = OTHER; note = 2'Fluoro nucleotide
  modified_base 8: mod_base = OTHER; note = 2'-O-methyl nucleotide
  modified_base 9..11: mod_base = OTHER; note = 2'Fluoro nucleotide
  modified_base 12..21: mod_base = OTHER; note = 2'-O-methyl nucleotide
tcataataatactaacatgtt

SEQ ID NO: 425 - RNA, 21 nt, synthetic construct
  source 1..21: mol_type = other RNA
  modified_base 1..6: mod_base = OTHER; note = 2'-O-methyl nucleotide
  modified_base 1..3: mod_base = OTHER; note = Phosphorothioate linkage
  modified_base 7: mod_base = OTHER; note = 2'Fluoro nucleotide
  modified_base 8: mod_base = OTHER; note = 2'-O-methyl nucleotide
  modified_base 9..11: mod_base = OTHER; note = 2'Fluoro nucleotide
  modified_base 12..21: mod_base = OTHER; note = 2'-O-methyl nucleotide
actaacatgttatttgccttt

SEQ ID NO: 426 - RNA, 21 nt, synthetic construct
  source 1..21: mol_type = other RNA
  modified_base 1..6: mod_base = OTHER; note = 2'-O-methyl nucleotide
  modified_base 1..3: mod_base = OTHER; note = Phosphorothioate linkage
  modified_base 7: mod_base = OTHER; note = 2'Fluoro nucleotide
  modified_base 8: mod_base = OTHER; note = 2'-O-methyl nucleotide
  modified_base 9..11: mod_base = OTHER; note = 2'Fluoro nucleotide
  modified_base 12..21: mod_base = OTHER; note = 2'-O-methyl nucleotide
gttatttgccttttgaattct

SEQ ID NO: 427 - RNA, 21 nt, synthetic construct
  source 1..21: mol_type = other RNA
  modified_base 1..6: mod_base = OTHER; note = 2'-O-methyl nucleotide
  modified_base 1..3: mod_base = OTHER; note = Phosphorothioate linkage
  modified_base 7: mod_base = OTHER; note = 2'Fluoro nucleotide
  modified_base 8: mod_base = OTHER; note = 2'-O-methyl nucleotide
  modified_base 9..11: mod_base = OTHER; note = 2'Fluoro nucleotide
  modified_base 12..21: mod_base = OTHER; note = 2'-O-methyl nucleotide
tgccttttgaattctcattat

SEQ ID NO: 428 - RNA, 21 nt, synthetic construct
  source 1..21: mol_type = other RNA
  modified_base 1..6: mod_base = OTHER; note = 2'-O-methyl nucleotide
  modified_base 1..3: mod_base = OTHER; note = Phosphorothioate linkage
  modified_base 7: mod_base = OTHER; note = 2'Fluoro nucleotide
  modified_base 8: mod_base = OTHER; note = 2'-O-methyl nucleotide
  modified_base 9..11: mod_base = OTHER; note = 2'Fluoro nucleotide
  modified_base 12..21: mod_base = OTHER; note = 2'-O-methyl nucleotide
gccttttgaattctcattatc

SEQ ID NO: 429 - RNA, 21 nt, synthetic construct
  source 1..21: mol_type = other RNA
  modified_base 1..6: mod_base = OTHER; note = 2'-O-methyl nucleotide
  modified_base 1..3: mod_base = OTHER; note = Phosphorothioate linkage
  modified_base 7: mod_base = OTHER; note = 2'Fluoro nucleotide
  modified_base 8: mod_base = OTHER; note = 2'-O-methyl nucleotide
  modified_base 9..11: mod_base = OTHER; note = 2'Fluoro nucleotide
  modified_base 12..21: mod_base = OTHER; note = 2'-O-methyl nucleotide
ccttttgaattctcattatct

SEQ ID NO: 430 - RNA, 21 nt, synthetic construct
  source 1..21: mol_type = other RNA
  modified_base 1..6: mod_base = OTHER; note = 2'-O-methyl nucleotide
  modified_base 1..3: mod_base = OTHER; note = Phosphorothioate linkage
  modified_base 7: mod_base = OTHER; note = 2'Fluoro nucleotide
  modified_base 8: mod_base = OTHER; note = 2'-O-methyl nucleotide
  modified_base 9..11: mod_base = OTHER; note = 2'Fluoro nucleotide
  modified_base 12..21: mod_base = OTHER; note = 2'-O-methyl nucleotide
cttttgaattctcattatctt

SEQ ID NO: 431 - RNA, 21 nt, synthetic construct
  source 1..21: mol_type = other RNA
  modified_base 1..6: mod_base = OTHER; note = 2'-O-methyl nucleotide
  modified_base 1..3: mod_base = OTHER; note = Phosphorothioate linkage
  modified_base 7: mod_base = OTHER; note = 2'Fluoro nucleotide
  modified_base 8: mod_base = OTHER; note = 2'-O-methyl nucleotide
  modified_base 9..11: mod_base = OTHER; note = 2'Fluoro nucleotide
  modified_base 12..21: mod_base = OTHER; note = 2'-O-methyl nucleotide
tgaattctcattatcttaaaa

SEQ ID NO: 432 - RNA, 21 nt, synthetic construct
  source 1..21: mol_type = other RNA
  modified_base 1..6: mod_base = OTHER; note = 2'-O-methyl nucleotide
  modified_base 1..3: mod_base = OTHER; note = Phosphorothioate linkage
  modified_base 7: mod_base = OTHER; note = 2'Fluoro nucleotide
  modified_base 8: mod_base = OTHER; note = 2'-O-methyl nucleotide
  modified_base 9..11: mod_base = OTHER; note = 2'Fluoro nucleotide
  modified_base 12..21: mod_base = OTHER; note = 2'-O-methyl nucleotide
gaattctcattatcttaaaat

SEQ ID NO: 433 - RNA, 21 nt, synthetic construct
  source 1..21: mol_type = other RNA
  modified_base 1..6: mod_base = OTHER; note = 2'-O-methyl nucleotide
  modified_base 1..3: mod_base = OTHER; note = Phosphorothioate linkage
  modified_base 7: mod_base = OTHER; note = 2'Fluoro nucleotide
  modified_base 8: mod_base = OTHER; note = 2'-O-methyl nucleotide
  modified_base 9..11: mod_base = OTHER; note = 2'Fluoro nucleotide
  modified_base 12..21: mod_base = OTHER; note = 2'-O-methyl nucleotide
ccgtgtgacatgtgattacat

SEQ ID NO: 434 - RNA, 21 nt, synthetic construct
  source 1..21: mol_type = other RNA
  modified_base 1..6: mod_base = OTHER; note = 2'-O-methyl nucleotide
  modified_base 1..3: mod_base = OTHER; note = Phosphorothioate linkage
  modified_base 7: mod_base = OTHER; note = 2'Fluoro nucleotide
  modified_base 8: mod_base = OTHER; note = 2'-O-methyl nucleotide
  modified_base 9..11: mod_base = OTHER; note = 2'Fluoro nucleotide
  modified_base 12..21: mod_base = OTHER; note = 2'-O-methyl nucleotide
tgtgacatgtgattacatcat

SEQ ID NO: 435 - RNA, 21 nt, synthetic construct
  source 1..21: mol_type = other RNA
  modified_base 1..6: mod_base = OTHER; note = 2'-O-methyl nucleotide
  modified_base 1..3: mod_base = OTHER; note = Phosphorothioate linkage
  modified_base 7: mod_base = OTHER; note = 2'Fluoro nucleotide
  modified_base 8: mod_base = OTHER; note = 2'-O-methyl nucleotide
  modified_base 9..11: mod_base = OTHER; note = 2'Fluoro nucleotide
  modified_base 12..21: mod_base = OTHER; note = 2'-O-methyl nucleotide
tgacatgtgattacatcatct

SEQ ID NO: 436 - RNA, 21 nt, synthetic construct
  source 1..21: mol_type = other RNA
  modified_base 1..6: mod_base = OTHER; note = 2'-O-methyl nucleotide
  modified_base 1..3: mod_base = OTHER; note = Phosphorothioate linkage
  modified_base 7: mod_base = OTHER; note = 2'Fluoro nucleotide
  modified_base 8: mod_base = OTHER; note = 2'-O-methyl nucleotide
  modified_base 9..11: mod_base = OTHER; note = 2'Fluoro nucleotide
  modified_base 12..21: mod_base = OTHER; note = 2'-O-methyl nucleotide
gacatgtgattacatcatctt

SEQ ID NO: 437 - RNA, 21 nt, synthetic construct
  source 1..21: mol_type = other RNA
  modified_base 1..6: mod_base = OTHER; note = 2'-O-methyl nucleotide
  modified_base 1..3: mod_base = OTHER; note = Phosphorothioate linkage
  modified_base 7: mod_base = OTHER; note = 2'Fluoro nucleotide
  modified_base 8: mod_base = OTHER; note = 2'-O-methyl nucleotide
  modified_base 9..11: mod_base = OTHER; note = 2'Fluoro nucleotide
  modified_base 12..21: mod_base = OTHER; note = 2'-O-methyl nucleotide
tctttctgacatcattgttaa

SEQ ID NO: 438 - RNA, 21 nt, synthetic construct
  source 1..21: mol_type = other RNA
  modified_base 1..6: mod_base = OTHER; note = 2'-O-methyl nucleotide
  modified_base 1..3: mod_base = OTHER; note = Phosphorothioate linkage
  modified_base 7: mod_base = OTHER; note = 2'Fluoro nucleotide
  modified_base 8: mod_base = OTHER; note = 2'-O-methyl nucleotide
  modified_base 9..11: mod_base = OTHER; note = 2'Fluoro nucleotide
  modified_base 12..21: mod_base = OTHER; note = 2'-O-methyl nucleotide
ctttctgacatcattgttaat

SEQ ID NO: 439 - RNA, 21 nt, synthetic construct
  source 1..21: mol_type = other RNA
  modified_base 1..6: mod_base = OTHER; note = 2'-O-methyl nucleotide
  modified_base 1..3: mod_base = OTHER; note = Phosphorothioate linkage
  modified_base 7: mod_base = OTHER; note = 2'Fluoro nucleotide
  modified_base 8: mod_base = OTHER; note = 2'-O-methyl nucleotide
  modified_base 9..11: mod_base = OTHER; note = 2'Fluoro nucleotide
  modified_base 12..21: mod_base = OTHER; note = 2'-O-methyl nucleotide
gacatcattgttaatggaatg

SEQ ID NO: 440 - RNA, 21 nt, synthetic construct
  source 1..21: mol_type = other RNA
  modified_base 1..6: mod_base = OTHER; note = 2'-O-methyl nucleotide
  modified_base 1..3: mod_base = OTHER; note = Phosphorothioate linkage
  modified_base 7: mod_base = OTHER; note = 2'Fluoro nucleotide
  modified_base 8: mod_base = OTHER; note = 2'-O-methyl nucleotide
  modified_base 9..11: mod_base = OTHER; note = 2'Fluoro nucleotide
  modified_base 12..21: mod_base = OTHER; note = 2'-O-methyl nucleotide
gttaatggaatgtgtgcttgt

SEQ ID NO: 441 - RNA, 23 nt, synthetic construct
  source 1..23: mol_type = other RNA
  modified_base 1: mod_base = OTHER; note = 2'-O-methyl nucleotide
  modified_base 2: mod_base = OTHER; note = 2'Fluoro nucleotide
  modified_base 1..3: mod_base = OTHER; note = Phosphorothioate linkage
  modified_base 3..5: mod_base = OTHER; note = 2'-O-methyl nucleotide
  modified_base 6: mod_base = OTHER; note = 2'Fluoro nucleotide
  modified_base 7: mod_base = OTHER; note = 2'-O-methyl nucleotide
  modified_base 8..9: mod_base = OTHER; note = 2'Fluoro nucleotide
  modified_base 10..13: mod_base = OTHER; note = 2'-O-methyl nucleotide
  modified_base 14: mod_base = OTHER; note = 2'Fluoro nucleotide
  modified_base 15: mod_base = OTHER; note = 2'-O-methyl nucleotide
  modified_base 16: mod_base = OTHER; note = 2'Fluoro nucleotide
  modified_base 17..23: mod_base = OTHER; note = 2'-O-methyl nucleotide
  modified_base 21..23: mod_base = OTHER; note = Phosphorothioate linkage
atggatagctgtgcttgaccctc

SEQ ID NO: 442 - RNA, 23 nt, synthetic construct
  source 1..23: mol_type = other RNA
  modified_base 1: mod_base = OTHER; note = 2'-O-methyl nucleotide
  modified_base 2: mod_base = OTHER; note = 2'Fluoro nucleotide
  modified_base 1..3: mod_base = OTHER; note = Phosphorothioate linkage
  modified_base 3..5: mod_base = OTHER; note = 2'-O-methyl nucleotide
  modified_base 6: mod_base = OTHER; note = 2'Fluoro nucleotide
  modified_base 7: mod_base = OTHER; note = 2'-O-methyl nucleotide
  modified_base 8..9: mod_base = OTHER; note = 2'Fluoro nucleotide
  modified_base 10..13: mod_base = OTHER; note = 2'-O-methyl nucleotide
  modified_base 14: mod_base = OTHER; note = 2'Fluoro nucleotide
  modified_base 15: mod_base = OTHER; note = 2'-O-methyl nucleotide
  modified_base 16: mod_base = OTHER; note = 2'Fluoro nucleotide
  modified_base 17..23: mod_base = OTHER; note = 2'-O-methyl nucleotide
  modified_base 21..23: mod_base = OTHER; note = Phosphorothioate linkage
atcatctgatggatagctgtgct

SEQ ID NO: 443 - RNA, 23 nt, synthetic construct
  source 1..23: mol_type = other RNA
  modified_base 1: mod_base = OTHER; note = 2'-O-methyl nucleotide
  modified_base 2: mod_base = OTHER; note = 2'Fluoro nucleotide
  modified_base 1..3: mod_base = OTHER; note = Phosphorothioate linkage
  modified_base 3..5: mod_base = OTHER; note = 2'-O-methyl nucleotide
  modified_base 6: mod_base = OTHER; note = 2'Fluoro nucleotide
  modified_base 7: mod_base = OTHER; note = 2'-O-methyl nucleotide
  modified_base 8..9: mod_base = OTHER; note = 2'Fluoro nucleotide
  modified_base 10..13: mod_base = OTHER; note = 2'-O-methyl nucleotide
  modified_base 14: mod_base = OTHER; note = 2'Fluoro nucleotide
  modified_base 15: mod_base = OTHER; note = 2'-O-methyl nucleotide
  modified_base 16: mod_base = OTHER; note = 2'Fluoro nucleotide
  modified_base 17..23: mod_base = OTHER; note = 2'-O-methyl nucleotide
  modified_base 21..23: mod_base = OTHER; note = Phosphorothioate linkage
agatcatctgatggatagctgtg

SEQ ID NO: 444 - RNA, 23 nt, synthetic construct
  source 1..23: mol_type = other RNA
  modified_base 1: mod_base = OTHER; note = 2'-O-methyl nucleotide
  modified_base 2: mod_base = OTHER; note = 2'Fluoro nucleotide
  modified_base 1..3: mod_base = OTHER; note = Phosphorothioate linkage
  modified_base 3..5: mod_base = OTHER; note = 2'-O-methyl nucleotide
  modified_base 6: mod_base = OTHER; note = 2'Fluoro nucleotide
  modified_base 7: mod_base = OTHER; note = 2'-O-methyl nucleotide
  modified_base 8..9: mod_base = OTHER; note = 2'Fluoro nucleotide
  modified_base 10..13: mod_base = OTHER; note = 2'-O-methyl nucleotide
  modified_base 14: mod_base = OTHER; note = 2'Fluoro nucleotide
  modified_base 15: mod_base = OTHER; note = 2'-O-methyl nucleotide
  modified_base 16: mod_base = OTHER; note = 2'Fluoro nucleotide
  modified_base 17..23: mod_base = OTHER; note = 2'-O-methyl nucleotide
  modified_base 21..23: mod_base = OTHER; note = Phosphorothioate linkage
tagatcatctgatggatagctgt

SEQ ID NO: 445 - RNA, 23 nt, synthetic construct
  source 1..23: mol_type = other RNA
  modified_base 1: mod_base = OTHER; note = 2'-O-methyl nucleotide
  modified_base 2: mod_base = OTHER; note = 2'Fluoro nucleotide
  modified_base 1..3: mod_base = OTHER; note = Phosphorothioate linkage
  modified_base 3..5: mod_base = OTHER; note = 2'-O-methyl nucleotide
  modified_base 6: mod_base = OTHER; note = 2'Fluoro nucleotide
  modified_base 7: mod_base = OTHER; note = 2'-O-methyl nucleotide
  modified_base 8..9: mod_base = OTHER; note = 2'Fluoro nucleotide
  modified_base 10..13: mod_base = OTHER; note = 2'-O-methyl nucleotide
  modified_base 14: mod_base = OTHER; note = 2'Fluoro nucleotide
  modified_base 15: mod_base = OTHER; note = 2'-O-methyl nucleotide
  modified_base 16: mod_base = OTHER; note = 2'Fluoro nucleotide
  modified_base 17..23: mod_base = OTHER; note = 2'-O-methyl nucleotide
  modified_base 21..23: mod_base = OTHER; note = Phosphorothioate linkage
agtagatcatctgatggatagct

SEQ ID NO: 446 - RNA, 23 nt, synthetic construct
  source 1..23: mol_type = other RNA
  modified_base 1: mod_base = OTHER; note = 2'-O-methyl nucleotide
  modified_base 2: mod_base = OTHER; note = 2'Fluoro nucleotide
  modified_base 1..3: mod_base = OTHER; note = Phosphorothioate linkage
  modified_base 3..5: mod_base = OTHER; note = 2'-O-methyl nucleotide
  modified_base 6: mod_base = OTHER; note = 2'Fluoro nucleotide
  modified_base 7: mod_base = OTHER; note = 2'-O-methyl nucleotide
  modified_base 8..9: mod_base = OTHER; note = 2'Fluoro nucleotide
  modified_base 10..13: mod_base = OTHER; note = 2'-O-methyl nucleotide
  modified_base 14: mod_base = OTHER; note = 2'Fluoro nucleotide
  modified_base 15: mod_base = OTHER; note = 2'-O-methyl nucleotide
  modified_base 16: mod_base = OTHER; note = 2'Fluoro nucleotide
  modified_base 17..23: mod_base = OTHER; note = 2'-O-methyl nucleotide
  modified_base 21..23: mod_base = OTHER; note = Phosphorothioate linkage
aagtagatcatctgatggatagc

SEQ ID NO: 447 - RNA, 23 nt, synthetic construct
  source 1..23: mol_type = other RNA
  modified_base 1: mod_base = OTHER; note = 2'-O-methyl nucleotide
  modified_base 2: mod_base = OTHER; note = 2'Fluoro nucleotide
  modified_base 1..3: mod_base = OTHER; note = Phosphorothioate linkage
  modified_base 3..5: mod_base = OTHER; note = 2'-O-methyl nucleotide
  modified_base 6: mod_base = OTHER; note = 2'Fluoro nucleotide
  modified_base 7: mod_base = OTHER; note = 2'-O-methyl nucleotide
  modified_base 8..9: mod_base = OTHER; note = 2'Fluoro nucleotide
  modified_base 10..13: mod_base = OTHER; note = 2'-O-methyl nucleotide
  modified_base 14: mod_base = OTHER; note = 2'Fluoro nucleotide
  modified_base 15: mod_base = OTHER; note = 2'-O-methyl nucleotide
  modified_base 16: mod_base = OTHER; note = 2'Fluoro nucleotide
  modified_base 17..23: mod_base = OTHER; note = 2'-O-methyl nucleotide
  modified_base 21..23: mod_base = OTHER; note = Phosphorothioate linkage
tgaaagtagatcatctgatggat

SEQ ID NO: 448 - RNA, 23 nt, synthetic construct
  source 1..23: mol_type = other RNA
  modified_base 1: mod_base = OTHER; note = 2'-O-methyl nucleotide
  modified_base 2: mod_base = OTHER; note = 2'Fluoro nucleotide
  modified_base 1..3: mod_base = OTHER; note = Phosphorothioate linkage
  modified_base 3..5: mod_base = OTHER; note = 2'-O-methyl nucleotide
  modified_base 6: mod_base = OTHER; note = 2'Fluoro nucleotide
  modified_base 7: mod_base = OTHER; note = 2'-O-methyl nucleotide
  modified_base 8..9: mod_base = OTHER; note = 2'Fluoro nucleotide
  modified_base 10..13: mod_base = OTHER; note = 2'-O-methyl nucleotide
  modified_base 14: mod_base = OTHER; note = 2'Fluoro nucleotide
  modified_base 15: mod_base = OTHER; note = 2'-O-methyl nucleotide
  modified_base 16: mod_base = OTHER; note = 2'Fluoro nucleotide
  modified_base 17..23: mod_base = OTHER; note = 2'-O-methyl nucleotide
  modified_base 21..23: mod_base = OTHER; note = Phosphorothioate linkage
actcaggaaggctgaaagtagat

SEQ ID NO: 449 - RNA, 23 nt, synthetic construct
  source 1..23: mol_type = other RNA
  modified_base 1: mod_base = OTHER; note = 2'-O-methyl nucleotide
  modified_base 2: mod_base = OTHER; note = 2'Fluoro nucleotide
  modified_base 1..3: mod_base = OTHER; note = Phosphorothioate linkage
  modified_base 3..5: mod_base = OTHER; note = 2'-O-methyl nucleotide
  modified_base 6: mod_base = OTHER; note = 2'Fluoro nucleotide
  modified_base 7: mod_base = OTHER; note = 2'-O-methyl nucleotide
  modified_base 8..9: mod_base = OTHER; note = 2'Fluoro nucleotide
  modified_base 10..13: mod_base = OTHER; note = 2'-O-methyl nucleotide
  modified_base 14: mod_base = OTHER; note = 2'Fluoro nucleotide
  modified_base 15: mod_base = OTHER; note = 2'-O-methyl nucleotide
  modified_base 16: mod_base = OTHER; note = 2'Fluoro nucleotide
  modified_base 17..23: mod_base = OTHER; note = 2'-O-methyl nucleotide
  modified_base 21..23: mod_base = OTHER; note = Phosphorothioate linkage
agccacctgtcttctattgtctg

SEQ ID NO: 450 - RNA, 23 nt, synthetic construct
  source 1..23: mol_type = other RNA
  modified_base 1: mod_base = OTHER; note = 2'-O-methyl nucleotide
  modified_base 2: mod_base = OTHER; note = 2'Fluoro nucleotide
  modified_base 1..3: mod_base = OTHER; note = Phosphorothioate linkage
  modified_base 3..5: mod_base = OTHER; note = 2'-O-methyl nucleotide
  modified_base 6: mod_base = OTHER; note = 2'Fluoro nucleotide
  modified_base 7: mod_base = OTHER; note = 2'-O-methyl nucleotide
  modified_base 8..9: mod_base = OTHER; note = 2'Fluoro nucleotide
  modified_base 10..13: mod_base = OTHER; note = 2'-O-methyl nucleotide
  modified_base 14: mod_base = OTHER; note = 2'Fluoro nucleotide
  modified_base 15: mod_base = OTHER; note = 2'-O-methyl nucleotide
  modified_base 16: mod_base = OTHER; note = 2'Fluoro nucleotide
  modified_base 17..23: mod_base = OTHER; note = 2'-O-methyl nucleotide
  modified_base 21..23: mod_base = OTHER; note = Phosphorothioate linkage
agtgacagcagacaccactgcca

SEQ ID NO: 451 - RNA, 23 nt, synthetic construct
  source 1..23: mol_type = other RNA
  modified_base 1: mod_base = OTHER; note = 2'-O-methyl nucleotide
  modified_base 2: mod_base = OTHER; note = 2'Fluoro nucleotide
  modified_base 1..3: mod_base = OTHER; note = Phosphorothioate linkage
  modified_base 3..5: mod_base = OTHER; note = 2'-O-methyl nucleotide
  modified_base 6: mod_base = OTHER; note = 2'Fluoro nucleotide
  modified_base 7: mod_base = OTHER; note = 2'-O-methyl nucleotide
  modified_base 8..9: mod_base = OTHER; note = 2'Fluoro nucleotide
  modified_base 10..13: mod_base = OTHER; note = 2'-O-methyl nucleotide
  modified_base 14: mod_base = OTHER; note = 2'Fluoro nucleotide
  modified_base 15: mod_base = OTHER; note = 2'-O-methyl nucleotide
  modified_base 16: mod_base = OTHER; note = 2'Fluoro nucleotide
  modified_base 17..23: mod_base = OTHER; note = 2'-O-methyl nucleotide
  modified_base 21..23: mod_base = OTHER; note = Phosphorothioate linkage
tgattgctgggggccaatgaggg

SEQ ID NO: 452 - RNA, 23 nt, synthetic construct
  source 1..23: mol_type = other RNA
  modified_base 1: mod_base = OTHER; note = 2'-O-methyl nucleotide
  modified_base 2: mod_base = OTHER; note = 2'Fluoro nucleotide
  modified_base 1..3: mod_base = OTHER; note = Phosphorothioate linkage
  modified_base 3..5: mod_base = OTHER; note = 2'-O-methyl nucleotide
  modified_base 6: mod_base = OTHER; note = 2'Fluoro nucleotide
  modified_base 7: mod_base = OTHER; note = 2'-O-methyl nucleotide
  modified_base 8..9: mod_base = OTHER; note = 2'Fluoro nucleotide
  modified_base 10..13: mod_base = OTHER; note = 2'-O-methyl nucleotide
  modified_base 14: mod_base = OTHER; note = 2'Fluoro nucleotide
  modified_base 15: mod_base = OTHER; note = 2'-O-methyl nucleotide
  modified_base 16: mod_base = OTHER; note = 2'Fluoro nucleotide
  modified_base 17..23: mod_base = OTHER; note = 2'-O-methyl nucleotide
  modified_base 21..23: mod_base = OTHER; note = Phosphorothioate linkage
agtttggagcccccacaggaggg

SEQ ID NO: 453 - RNA, 23 nt, synthetic construct
  source 1..23: mol_type = other RNA
  modified_base 1: mod_base = OTHER; note = 2'-O-methyl nucleotide
  modified_base 2: mod_base = OTHER; note = 2'Fluoro nucleotide
  modified_base 1..3: mod_base = OTHER; note = Phosphorothioate linkage
  modified_base 3..5: mod_base = OTHER; note = 2'-O-methyl nucleotide
  modified_base 6: mod_base = OTHER; note = 2'Fluoro nucleotide
  modified_base 7: mod_base = OTHER; note = 2'-O-methyl nucleotide
  modified_base 8..9: mod_base = OTHER; note = 2'Fluoro nucleotide
  modified_base 10..13: mod_base = OTHER; note = 2'-O-methyl nucleotide
  modified_base 14: mod_base = OTHER; note = 2'Fluoro nucleotide
  modified_base 15: mod_base = OTHER; note = 2'-O-methyl nucleotide
  modified_base 16: mod_base = OTHER; note = 2'Fluoro nucleotide
  modified_base 17..23: mod_base = OTHER; note = 2'-O-methyl nucleotide
  modified_base 21..23: mod_base = OTHER; note = Phosphorothioate linkage
ttgctgcttggctagctccagca

SEQ ID NO: 454 - RNA, 23 nt, synthetic construct
  source 1..23: mol_type = other RNA
  modified_base 1: mod_base = OTHER; note = 2'-O-methyl nucleotide
  modified_base 2: mod_base = OTHER; note = 2'Fluoro nucleotide
  modified_base 1..3: mod_base = OTHER; note = Phosphorothioate linkage
  modified_base 3..5: mod_base = OTHER; note = 2'-O-methyl nucleotide
  modified_base 6: mod_base = OTHER; note = 2'Fluoro nucleotide
  modified_base 7: mod_base = OTHER; note = 2'-O-methyl nucleotide
  modified_base 8..9: mod_base = OTHER; note = 2'Fluoro nucleotide
  modified_base 10..13: mod_base = OTHER; note = 2'-O-methyl nucleotide
  modified_base 14: mod_base = OTHER; note = 2'Fluoro nucleotide
  modified_base 15: mod_base = OTHER; note = 2'-O-methyl nucleotide
  modified_base 16: mod_base = OTHER; note = 2'Fluoro nucleotide
  modified_base 17..23: mod_base = OTHER; note = 2'-O-methyl nucleotide
  modified_base 21..23: mod_base = OTHER; note = Phosphorothioate linkage
tttgctgcttggctagctccagc

SEQ ID NO: 455 - RNA, 23 nt, synthetic construct
  source 1..23: mol_type = other RNA
  modified_base 1: mod_base = OTHER; note = 2'-O-methyl nucleotide
  modified_base 2: mod_base = OTHER; note = 2'Fluoro nucleotide
  modified_base 1..3: mod_base = OTHER; note = Phosphorothioate linkage
  modified_base 3..5: mod_base = OTHER; note = 2'-O-methyl nucleotide
  modified_base 6: mod_base = OTHER; note = 2'Fluoro nucleotide
  modified_base 7: mod_base = OTHER; note = 2'-O-methyl nucleotide
  modified_base 8..9: mod_base = OTHER; note = 2'Fluoro nucleotide
  modified_base 10..13: mod_base = OTHER; note = 2'-O-methyl nucleotide
  modified_base 14: mod_base = OTHER; note = 2'Fluoro nucleotide
  modified_base 15: mod_base = OTHER; note = 2'-O-methyl nucleotide
  modified_base 16: mod_base = OTHER; note = 2'Fluoro nucleotide
  modified_base 17..23: mod_base = OTHER; note = 2'-O-methyl nucleotide
  modified_base 21..23: mod_base = OTHER; note = Phosphorothioate linkage
atttgctgcttggctagctccag

SEQ ID NO: 456 - RNA, 23 nt, synthetic construct
  source 1..23: mol_type = other RNA
  modified_base 1: mod_base = OTHER; note = 2'-O-methyl nucleotide
  modified_base 2: mod_base = OTHER; note = 2'Fluoro nucleotide
  modified_base 1..3: mod_base = OTHER; note = Phosphorothioate linkage
  modified_base 3..5: mod_base = OTHER; note = 2'-O-methyl nucleotide
  modified_base 6: mod_base = OTHER; note = 2'Fluoro nucleotide
  modified_base 7: mod_base = OTHER; note = 2'-O-methyl nucleotide
  modified_base 8..9: mod_base = OTHER; note = 2'Fluoro nucleotide
  modified_base 10..13: mod_base = OTHER; note = 2'-O-methyl nucleotide
  modified_base 14: mod_base = OTHER; note = 2'Fluoro nucleotide
  modified_base 15: mod_base = OTHER; note = 2'-O-methyl nucleotide
  modified_base 16: mod_base = OTHER; note = 2'Fluoro nucleotide
  modified_base 17..23: mod_base = OTHER; note = 2'-O-methyl nucleotide
  modified_base 21..23: mod_base = OTHER; note = Phosphorothioate linkage
gatttgctgcttggctagctcca

SEQ ID NO: 457 - RNA, 23 nt, synthetic construct
  source 1..23: mol_type = other RNA
  modified_base 1: mod_base = OTHER; note = 2'-O-methyl nucleotide
  modified_base 2: mod_base = OTHER; note = 2'Fluoro nucleotide
  modified_base 1..3: mod_base = OTHER; note = Phosphorothioate linkage
  modified_base 3..5: mod_base = OTHER; note = 2'-O-methyl nucleotide
  modified_base 6: mod_base = OTHER; note = 2'Fluoro nucleotide
  modified_base 7: mod_base = OTHER; note = 2'-O-methyl nucleotide
  modified_base 8..9: mod_base = OTHER; note = 2'Fluoro nucleotide
  modified_base 10..13: mod_base = OTHER; note = 2'-O-methyl nucleotide
  modified_base 14: mod_base = OTHER; note = 2'Fluoro nucleotide
  modified_base 15: mod_base = OTHER; note = 2'-O-methyl nucleotide
  modified_base 16: mod_base = OTHER; note = 2'Fluoro nucleotide
  modified_base 17..23: mod_base = OTHER; note = 2'-O-methyl nucleotide
  modified_base 21..23: mod_base = OTHER; note = Phosphorothioate linkage
ggatttgctgcttggctagctcc

SEQ ID NO: 458 - RNA, 23 nt, synthetic construct
  source 1..23: mol_type = other RNA
  modified_base 1: mod_base = OTHER; note = 2'-O-methyl nucleotide
  modified_base 2: mod_base = OTHER; note = 2'Fluoro nucleotide
  modified_base 1..3: mod_base = OTHER; note = Phosphorothioate linkage
  modified_base 3..5: mod_base = OTHER; note = 2'-O-methyl nucleotide
  modified_base 6: mod_base = OTHER; note = 2'Fluoro nucleotide
  modified_base 7: mod_base = OTHER; note = 2'-O-methyl nucleotide
  modified_base 8..9: mod_base = OTHER; note = 2'Fluoro nucleotide
  modified_base 10..13: mod_base = OTHER; note = 2'-O-methyl nucleotide
  modified_base 14: mod_base = OTHER; note = 2'Fluoro nucleotide
  modified_base 15: mod_base = OTHER; note = 2'-O-methyl nucleotide
  modified_base 16: mod_base = OTHER; note = 2'Fluoro nucleotide
  modified_base 17..23: mod_base = OTHER; note = 2'-O-methyl nucleotide
  modified_base 21..23: mod_base = OTHER; note = Phosphorothioate linkage
aggatttgctgcttggctagctc

SEQ ID NO: 459 - RNA, 23 nt, synthetic construct
  source 1..23: mol_type = other RNA
  modified_base 1: mod_base = OTHER; note = 2'-O-methyl nucleotide
  modified_base 2: mod_base = OTHER; note = 2'Fluoro nucleotide
  modified_base 1..3: mod_base = OTHER; note = Phosphorothioate linkage
  modified_base 3..5: mod_base = OTHER; note = 2'-O-methyl nucleotide
  modified_base 6: mod_base = OTHER; note = 2'Fluoro nucleotide
  modified_base 7: mod_base = OTHER; note = 2'-O-methyl nucleotide
  modified_base 8..9: mod_base = OTHER; note = 2'Fluoro nucleotide
  modified_base 10..13: mod_base = OTHER; note = 2'-O-methyl nucleotide
  modified_base 14: mod_base = OTHER; note = 2'Fluoro nucleotide
  modified_base 15: mod_base = OTHER; note = 2'-O-methyl nucleotide
  modified_base 16: mod_base = OTHER; note = 2'Fluoro nucleotide
  modified_base 17..23: mod_base = OTHER; note = 2'-O-methyl nucleotide
  modified_base 21..23: mod_base = OTHER; note = Phosphorothioate linkage
ccaggatttgctgcttggctagc

SEQ ID NO: 460 - RNA, 23 nt, synthetic construct
  source 1..23: mol_type = other RNA
  modified_base 1: mod_base = OTHER; note = 2'-O-methyl nucleotide
  modified_base 2: mod_base = OTHER; note = 2'Fluoro nucleotide
  modified_base 1..3: mod_base = OTHER; note = Phosphorothioate linkage
  modified_base 3..5: mod_base = OTHER; note = 2'-O-methyl nucleotide
  modified_base 6: mod_base = OTHER; note = 2'Fluoro nucleotide
  modified_base 7: mod_base = OTHER; note = 2'-O-methyl nucleotide
  modified_base 8..9: mod_base = OTHER; note = 2'Fluoro nucleotide
  modified_base 10..13: mod_base = OTHER; note = 2'-O-methyl nucleotide
  modified_base 14: mod_base = OTHER; note = 2'Fluoro nucleotide
  modified_base 15: mod_base = OTHER; note = 2'-O-methyl nucleotide
  modified_base 16: mod_base = OTHER; note = 2'Fluoro nucleotide
  modified_base 17..23: mod_base = OTHER; note = 2'-O-methyl nucleotide
  modified_base 21..23: mod_base = OTHER; note = Phosphorothioate linkage
atccaggatttgctgcttggcta

SEQ ID NO: 461 - RNA, 23 nt, synthetic construct
  source 1..23: mol_type = other RNA
  modified_base 1: mod_base = OTHER; note = 2'-O-methyl nucleotide
  modified_base 2: mod_base = OTHER; note = 2'Fluoro nucleotide
  modified_base 1..3: mod_base = OTHER; note = Phosphorothioate linkage
  modified_base 3..5: mod_base = OTHER; note = 2'-O-methyl nucleotide
  modified_base 6: mod_base = OTHER; note = 2'Fluoro nucleotide
  modified_base 7: mod_base = OTHER; note = 2'-O-methyl nucleotide
  modified_base 8..9: mod_base = OTHER; note = 2'Fluoro nucleotide
  modified_base 10..13: mod_base = OTHER; note = 2'-O-methyl nucleotide
  modified_base 14: mod_base = OTHER; note = 2'Fluoro nucleotide
  modified_base 15: mod_base = OTHER; note = 2'-O-methyl nucleotide
  modified_base 16: mod_base = OTHER; note = 2'Fluoro nucleotide
  modified_base 17..23: mod_base = OTHER; note = 2'-O-methyl nucleotide
  modified_base 21..23: mod_base = OTHER; note = Phosphorothioate linkage
ttattctgggacgactggtcagg

SEQ ID NO: 462 - RNA, 23 nt, synthetic construct
  source 1..23: mol_type = other RNA
  modified_base 1: mod_base = OTHER; note = 2'-O-methyl nucleotide
  modified_base 2: mod_base = OTHER; note = 2'Fluoro nucleotide
  modified_base 1..3: mod_base = OTHER; note = Phosphorothioate linkage
  modified_base 3..5: mod_base = OTHER; note = 2'-O-methyl nucleotide
  modified_base 6: mod_base = OTHER; note = 2'Fluoro nucleotide
  modified_base 7: mod_base = OTHER; note = 2'-O-methyl nucleotide
  modified_base 8..9: mod_base = OTHER; note = 2'Fluoro nucleotide
  modified_base 10..13: mod_base = OTHER; note = 2'-O-methyl nucleotide
  modified_base 14: mod_base = OTHER; note = 2'Fluoro nucleotide
  modified_base 15: mod_base = OTHER; note = 2'-O-methyl nucleotide
  modified_base 16: mod_base = OTHER; note = 2'Fluoro nucleotide
  modified_base 17..23: mod_base = OTHER; note = 2'-O-methyl nucleotide
  modified_base 21..23: mod_base = OTHER; note = Phosphorothioate linkage
agttattctgggacgactggtca

SEQ ID NO: 463 - RNA, 23 nt, synthetic construct
  source 1..23: mol_type = other RNA
  modified_base 1: mod_base = OTHER; note = 2'-O-methyl nucleotide
  modified_base 2: mod_base = OTHER; note = 2'Fluoro nucleotide
  modified_base 1..3: mod_base = OTHER; note = Phosphorothioate linkage
  modified_base 3..5: mod_base = OTHER; note = 2'-O-methyl nucleotide
  modified_base 6: mod_base = OTHER; note = 2'Fluoro nucleotide
  modified_base 7: mod_base = OTHER; note = 2'-O-methyl nucleotide
  modified_base 8..9: mod_base = OTHER; note = 2'Fluoro nucleotide
  modified_base 10..13: mod_base = OTHER; note = 2'-O-methyl nucleotide
  modified_base 14: mod_base = OTHER; note = 2'Fluoro nucleotide
  modified_base 15: mod_base = OTHER; note = 2'-O-methyl nucleotide
  modified_base 16: mod_base = OTHER; note = 2'Fluoro nucleotide
  modified_base 17..23: mod_base = OTHER; note = 2'-O-methyl nucleotide
  modified_base 21..23: mod_base = OTHER; note = Phosphorothioate linkage
aggatgagttattctgggacgac

SEQ ID NO: 464 - RNA, 23 nt, synthetic construct
  source 1..23: mol_type = other RNA
  modified_base 1: mod_base = OTHER; note = 2'-O-methyl nucleotide
  modified_base 2: mod_base = OTHER; note = 2'Fluoro nucleotide
  modified_base 1..3: mod_base = OTHER; note = Phosphorothioate linkage
  modified_base 3..5: mod_base = OTHER; note = 2'-O-methyl nucleotide
  modified_base 6: mod_base = OTHER; note = 2'Fluoro nucleotide
  modified_base 7: mod_base = OTHER; note = 2'-O-methyl nucleotide
  modified_base 8..9: mod_base = OTHER; note = 2'Fluoro nucleotide
  modified_base 10..13: mod_base = OTHER; note = 2'-O-methyl nucleotide
  modified_base 14: mod_base = OTHER; note = 2'Fluoro nucleotide
  modified_base 15: mod_base = OTHER; note = 2'-O-methyl nucleotide
  modified_base 16: mod_base = OTHER; note = 2'Fluoro nucleotide
  modified_base 17..23: mod_base = OTHER; note = 2'-O-methyl nucleotide
  modified_base 21..23: mod_base = OTHER; note = Phosphorothioate linkage
tccggagggctctggtcagcgct

SEQ ID NO: 465 - RNA, 23 nt, synthetic construct
  source 1..23: mol_type = other RNA
  modified_base 1: mod_base = OTHER; note = 2'-O-methyl nucleotide
  modified_base 2: mod_base = OTHER; note = 2'Fluoro nucleotide
  modified_base 1..3: mod_base = OTHER; note = Phosphorothioate linkage
  modified_base 3..5: mod_base = OTHER; note = 2'-O-methyl nucleotide
  modified_base 6: mod_base = OTHER; note = 2'Fluoro nucleotide
  modified_base 7: mod_base = OTHER; note = 2'-O-methyl nucleotide
  modified_base 8..9: mod_base = OTHER; note = 2'Fluoro nucleotide
  modified_base 10..13: mod_base = OTHER; note = 2'-O-methyl nucleotide
  modified_base 14: mod_base = OTHER; note = 2'Fluoro nucleotide
  modified_base 15: mod_base = OTHER; note = 2'-O-methyl nucleotide
  modified_base 16: mod_base = OTHER; note = 2'Fluoro nucleotide
  modified_base 17..23: mod_base = OTHER; note = 2'-O-methyl nucleotide
  modified_base 21..23: mod_base = OTHER; note = Phosphorothioate linkage
ctccggagggctctggtcagcgc

SEQ ID NO: 466 - RNA, 23 nt, synthetic construct
  source 1..23: mol_type = other RNA
  modified_base 1: mod_base = OTHER; note = 2'-O-methyl nucleotide
  modified_base 2: mod_base = OTHER; note = 2'Fluoro nucleotide
  modified_base 1..3: mod_base = OTHER; note = Phosphorothioate linkage
  modified_base 3..5: mod_base = OTHER; note = 2'-O-methyl nucleotide
  modified_base 6: mod_base = OTHER; note = 2'Fluoro nucleotide
  modified_base 7: mod_base = OTHER; note = 2'-O-methyl nucleotide
  modified_base 8..9: mod_base = OTHER; note = 2'Fluoro nucleotide
  modified_base 10..13: mod_base = OTHER; note = 2'-O-methyl nucleotide
  modified_base 14: mod_base = OTHER; note = 2'Fluoro nucleotide
  modified_base 15: mod_base = OTHER; note = 2'-O-methyl nucleotide
  modified_base 16: mod_base = OTHER; note = 2'Fluoro nucleotide
  modified_base 17..23: mod_base = OTHER; note = 2'-O-methyl nucleotide
  modified_base 21..23: mod_base = OTHER; note = Phosphorothioate linkage
tctccggagggctctggtcagcg

SEQ ID NO: 467 - RNA, 23 nt, synthetic construct
  source 1..23: mol_type = other RNA
  modified_base 1: mod_base = OTHER; note = 2'-O-methyl nucleotide
  modified_base 2: mod_base = OTHER; note = 2'Fluoro nucleotide
  modified_base 1..3: mod_base = OTHER; note = Phosphorothioate linkage
  modified_base 3..5: mod_base = OTHER; note = 2'-O-methyl nucleotide
  modified_base 6: mod_base = OTHER; note = 2'Fluoro nucleotide
  modified_base 7: mod_base = OTHER; note = 2'-O-methyl nucleotide
  modified_base 8..9: mod_base = OTHER; note = 2'Fluoro nucleotide
  modified_base 10..13: mod_base = OTHER; note = 2'-O-methyl nucleotide
  modified_base 14: mod_base = OTHER; note = 2'Fluoro nucleotide
  modified_base 15: mod_base = OTHER; note = 2'-O-methyl nucleotide
  modified_base 16: mod_base = OTHER; note = 2'Fluoro nucleotide
  modified_base 17..23: mod_base = OTHER; note = 2'-O-methyl nucleotide
  modified_base 21..23: mod_base = OTHER; note = Phosphorothioate linkage
gtctccggagggctctggtcagc

SEQ ID NO: 468 - RNA, 23 nt, synthetic construct
  source 1..23: mol_type = other RNA
  modified_base 1: mod_base = OTHER; note = 2'-O-methyl nucleotide
  modified_base 2: mod_base = OTHER; note = 2'Fluoro nucleotide
  modified_base 1..3: mod_base = OTHER; note = Phosphorothioate linkage
  modified_base 3..5: mod_base = OTHER; note = 2'-O-methyl nucleotide
  modified_base 6: mod_base = OTHER; note = 2'Fluoro nucleotide
  modified_base 7: mod_base = OTHER; note = 2'-O-methyl nucleotide
  modified_base 8..9: mod_base = OTHER; note = 2'Fluoro nucleotide
  modified_base 10..13: mod_base = OTHER; note = 2'-O-methyl nucleotide
  modified_base 14: mod_base = OTHER; note = 2'Fluoro nucleotide
  modified_base 15: mod_base = OTHER; note = 2'-O-methyl nucleotide
  modified_base 16: mod_base = OTHER; note = 2'Fluoro nucleotide
  modified_base 17..23: mod_base = OTHER; note = 2'-O-methyl nucleotide
  modified_base 21..23: mod_base = OTHER; note = Phosphorothioate linkage
agtctccggagggctctggtcag

SEQ ID NO: 469 - RNA, 23 nt, synthetic construct
  source 1..23: mol_type = other RNA
  modified_base 1: mod_base = OTHER; note = 2'-O-methyl nucleotide
  modified_base 2: mod_base = OTHER; note = 2'Fluoro nucleotide
  modified_base 1..3: mod_base = OTHER; note = Phosphorothioate linkage
  modified_base 3..5: mod_base = OTHER; note = 2'-O-methyl nucleotide
  modified_base 6: mod_base = OTHER; note = 2'Fluoro nucleotide
  modified_base 7: mod_base = OTHER; note = 2'-O-methyl nucleotide
  modified_base 8..9: mod_base = OTHER; note = 2'Fluoro nucleotide
  modified_base 10..13: mod_base = OTHER; note = 2'-O-methyl nucleotide
  modified_base 14: mod_base = OTHER; note = 2'Fluoro nucleotide
  modified_base 15: mod_base = OTHER; note = 2'-O-methyl nucleotide
  modified_base 16: mod_base = OTHER; note = 2'Fluoro nucleotide
  modified_base 17..23: mod_base = OTHER; note = 2'-O-methyl nucleotide
  modified_base 21..23: mod_base = OTHER; note = Phosphorothioate linkage
tagtctccggagggctctggtca

SEQ ID NO: 470 - RNA, 23 nt, synthetic construct
  source 1..23: mol_type = other RNA
  modified_base 1: mod_base = OTHER; note = 2'-O-methyl nucleotide
  modified_base 2: mod_base = OTHER; note = 2'Fluoro nucleotide
  modified_base 1..3: mod_base = OTHER; note = Phosphorothioate linkage
  modified_base 3..5: mod_base = OTHER; note = 2'-O-methyl nucleotide
  modified_base 6: mod_base = OTHER; note = 2'Fluoro nucleotide
  modified_base 7: mod_base = OTHER; note = 2'-O-methyl nucleotide
  modified_base 8..9: mod_base = OTHER; note = 2'Fluoro nucleotide
  modified_base 10..13: mod_base = OTHER; note = 2'-O-methyl nucleotide
  modified_base 14: mod_base = OTHER; note = 2'Fluoro nucleotide
  modified_base 15: mod_base = OTHER; note = 2'-O-methyl nucleotide
  modified_base 16: mod_base = OTHER; note = 2'Fluoro nucleotide
  modified_base 17..23: mod_base = OTHER; note = 2'-O-methyl nucleotide
  modified_base 21..23: mod_base = OTHER; note = Phosphorothioate linkage
atgacctcctccccattccctgg

SEQ ID NO: 471 - RNA, 23 nt, synthetic construct
  source 1..23: mol_type = other RNA
  modified_base 1: mod_base = OTHER; note = 2'-O-methyl nucleotide
  modified_base 2: mod_base = OTHER; note = 2'Fluoro nucleotide
  modified_base 1..3: mod_base = OTHER; note = Phosphorothioate linkage
  modified_base 3..5: mod_base = OTHER; note = 2'-O-methyl nucleotide
  modified_base 6: mod_base = OTHER; note = 2'Fluoro nucleotide
  modified_base 7: mod_base = OTHER; note = 2'-O-methyl nucleotide
  modified_base 8..9: mod_base = OTHER; note = 2'Fluoro nucleotide
  modified_base 10..13: mod_base = OTHER; note = 2'-O-methyl nucleotide
  modified_base 14: mod_base = OTHER; note = 2'Fluoro nucleotide
  modified_base 15: mod_base = OTHER; note = 2'-O-methyl nucleotide
  modified_base 16: mod_base = OTHER; note = 2'Fluoro nucleotide
  modified_base 17..23: mod_base = OTHER; note = 2'-O-methyl nucleotide
  modified_base 21..23: mod_base = OTHER; note = Phosphorothioate linkage
tagcaaagctgatgacctcctcc

SEQ ID NO: 472 - RNA, 23 nt, synthetic construct
  source 1..23: mol_type = other RNA
  modified_base 1: mod_base = OTHER; note = 2'-O-methyl nucleotide
  modified_base 2: mod_base = OTHER; note = 2'Fluoro nucleotide
  modified_base 1..3: mod_base = OTHER; note = Phosphorothioate linkage
  modified_base 3..5: mod_base = OTHER; note = 2'-O-methyl nucleotide
  modified_base 6: mod_base = OTHER; note = 2'Fluoro nucleotide
  modified_base 7: mod_base = OTHER; note = 2'-O-methyl nucleotide
  modified_base 8..9: mod_base = OTHER; note = 2'Fluoro nucleotide
  modified_base 10..13: mod_base = OTHER; note = 2'-O-methyl nucleotide
  modified_base 14: mod_base = OTHER; note = 2'Fluoro nucleotide
  modified_base 15: mod_base = OTHER; note = 2'-O-methyl nucleotide
  modified_base 16: mod_base = OTHER; note = 2'Fluoro nucleotide
  modified_base 17..23: mod_base = OTHER; note = 2'-O-methyl nucleotide
  modified_base 21..23: mod_base = OTHER; note = Phosphorothioate linkage
agtagcaaagctgatgacctcct

SEQ ID NO: 473 - RNA, 23 nt, synthetic construct
  source 1..23: mol_type = other RNA
  modified_base 1: mod_base = OTHER; note = 2'-O-methyl nucleotide
  modified_base 2: mod_base = OTHER; note = 2'Fluoro nucleotide
  modified_base 1..3: mod_base = OTHER; note = Phosphorothioate linkage
  modified_base 3..5: mod_base = OTHER; note = 2'-O-methyl nucleotide
  modified_base 6: mod_base = OTHER; note = 2'Fluoro nucleotide
  modified_base 7: mod_base = OTHER; note = 2'-O-methyl nucleotide
  modified_base 8..9: mod_base = OTHER; note = 2'Fluoro nucleotide
  modified_base 10..13: mod_base = OTHER; note = 2'-O-methyl nucleotide
  modified_base 14: mod_base = OTHER; note = 2'Fluoro nucleotide
  modified_base 15: mod_base = OTHER; note = 2'-O-methyl nucleotide
  modified_base 16: mod_base = OTHER; note = 2'Fluoro nucleotide
  modified_base 17..23: mod_base = OTHER; note = 2'-O-methyl nucleotide
  modified_base 21..23: mod_base = OTHER; note = Phosphorothioate linkage
agtctgtgacagtagcaaagctg

SEQ ID NO: 474 - RNA, 23 nt, synthetic construct
  source 1..23: mol_type = other RNA
  modified_base 1: mod_base = OTHER; note = 2'-O-methyl nucleotide
  modified_base 2: mod_base = OTHER; note = 2'Fluoro nucleotide
  modified_base 1..3: mod_base = OTHER; note = Phosphorothioate linkage
  modified_base 3..5: mod_base = OTHER; note = 2'-O-methyl nucleotide
  modified_base 6: mod_base = OTHER; note = 2'Fluoro nucleotide
  modified_base 7: mod_base = OTHER; note = 2'-O-methyl nucleotide
  modified_base 8..9: mod_base = OTHER; note = 2'Fluoro nucleotide
  modified_base 10..13: mod_base = OTHER; note = 2'-O-methyl nucleotide
  modified_base 14: mod_base = OTHER; note = 2'Fluoro nucleotide
  modified_base 15: mod_base = OTHER; note = 2'-O-methyl nucleotide
  modified_base 16: mod_base = OTHER; note = 2'Fluoro nucleotide
  modified_base 17..23: mod_base = OTHER; note = 2'-O-methyl nucleotide
  modified_base 21..23: mod_base = OTHER; note = Phosphorothioate linkage
atggtacaggtggtgggaccgag

SEQ ID NO: 475 - RNA, 23 nt, synthetic construct
  source 1..23: mol_type = other RNA
  modified_base 1: mod_base = OTHER; note = 2'-O-methyl nucleotide
  modified_base 2: mod_base = OTHER; note = 2'Fluoro nucleotide
  modified_base 1..3: mod_base = OTHER; note = Phosphorothioate linkage
  modified_base 3..5: mod_base = OTHER; note = 2'-O-methyl nucleotide
  modified_base 6: mod_base = OTHER; note = 2'Fluoro nucleotide
  modified_base 7: mod_base = OTHER; note = 2'-O-methyl nucleotide
  modified_base 8..9: mod_base = OTHER; note = 2'Fluoro nucleotide
  modified_base 10..13: mod_base = OTHER; note = 2'-O-methyl nucleotide
  modified_base 14: mod_base = OTHER; note = 2'Fluoro nucleotide
  modified_base 15: mod_base = OTHER; note = 2'-O-methyl nucleotide
  modified_base 16: mod_base = OTHER; note = 2'Fluoro nucleotide
  modified_base 17..23: mod_base = OTHER; note = 2'-O-methyl nucleotide
  modified_base 21..23: mod_base = OTHER; note = Phosphorothioate linkage
catggtacaggtggtgggaccga

SEQ ID NO: 476 - RNA, 23 nt, synthetic construct
  source 1..23: mol_type = other RNA
  modified_base 1: mod_base = OTHER; note = 2'-O-methyl nucleotide
  modified_base 2: mod_base = OTHER; note = 2'Fluoro nucleotide
  modified_base 1..3: mod_base = OTHER; note = Phosphorothioate linkage
  modified_base 3..5: mod_base = OTHER; note = 2'-O-methyl nucleotide
  modified_base 6: mod_base = OTHER; note = 2'Fluoro nucleotide
  modified_base 7: mod_base = OTHER; note = 2'-O-methyl nucleotide
  modified_base 8..9: mod_base = OTHER; note = 2'Fluoro nucleotide
  modified_base 10..13: mod_base = OTHER; note = 2'-O-methyl nucleotide
  modified_base 14: mod_base = OTHER; note = 2'Fluoro nucleotide
  modified_base 15: mod_base = OTHER; note = 2'-O-methyl nucleotide
  modified_base 16: mod_base = OTHER; note = 2'Fluoro nucleotide
  modified_base 17..23: mod_base = OTHER; note = 2'-O-methyl nucleotide
  modified_base 21..23: mod_base = OTHER; note = Phosphorothioate linkage
gcatggtacaggtggtgggaccg

SEQ ID NO: 477 - RNA, 23 nt, synthetic construct
  source 1..23: mol_type = other RNA
  modified_base 1: mod_base = OTHER; note = 2'-O-methyl nucleotide
  modified_base 2: mod_base = OTHER; note = 2'Fluoro nucleotide
  modified_base 1..3: mod_base = OTHER; note = Phosphorothioate linkage
  modified_base 3..5: mod_base = OTHER; note = 2'-O-methyl nucleotide
  modified_base 6: mod_base = OTHER; note = 2'Fluoro nucleotide
  modified_base 7: mod_base = OTHER; note = 2'-O-methyl nucleotide
  modified_base 8..9: mod_base = OTHER; note = 2'Fluoro nucleotide
  modified_base 10..13: mod_base = OTHER; note = 2'-O-methyl nucleotide
  modified_base 14: mod_base = OTHER; note = 2'Fluoro nucleotide
  modified_base 15: mod_base = OTHER; note = 2'-O-methyl nucleotide
  modified_base 16: mod_base = OTHER; note = 2'Fluoro nucleotide
  modified_base 17..23: mod_base = OTHER; note = 2'-O-methyl nucleotide
  modified_base 21..23: mod_base = OTHER; note = Phosphorothioate linkage
ggcatggtacaggtggtgggacc

SEQ ID NO: 478 - RNA, 23 nt, synthetic construct
  source 1..23: mol_type = other RNA
  modified_base 1: mod_base = OTHER; note = 2'-O-methyl nucleotide
  modified_base 2: mod_base = OTHER; note = 2'Fluoro nucleotide
  modified_base 1..3: mod_base = OTHER; note = Phosphorothioate linkage
  modified_base 3..5: mod_base = OTHER; note = 2'-O-methyl nucleotide
  modified_base 6: mod_base = OTHER; note = 2'Fluoro nucleotide
  modified_base 7: mod_base = OTHER; note = 2'-O-methyl nucleotide
  modified_base 8..9: mod_base = OTHER; note = 2'Fluoro nucleotide
  modified_base 10..13: mod_base = OTHER; note = 2'-O-methyl nucleotide
  modified_base 14: mod_base = OTHER; note = 2'Fluoro nucleotide
  modified_base 15: mod_base = OTHER; note = 2'-O-methyl nucleotide
  modified_base 16: mod_base = OTHER; note = 2'Fluoro nucleotide
  modified_base 17..23: mod_base = OTHER; note = 2'-O-methyl nucleotide
  modified_base 21..23: mod_base = OTHER; note = Phosphorothioate linkage
gggcatggtacaggtggtgggac

SEQ ID NO: 479 - RNA, 23 nt, synthetic construct
  source 1..23: mol_type = other RNA
  modified_base 1: mod_base = OTHER; note = 2'-O-methyl nucleotide
  modified_base 2: mod_base = OTHER; note = 2'Fluoro nucleotide
  modified_base 1..3: mod_base = OTHER; note = Phosphorothioate linkage
  modified_base 3..5: mod_base = OTHER; note = 2'-O-methyl nucleotide
  modified_base 6: mod_base = OTHER; note = 2'Fluoro nucleotide
  modified_base 7: mod_base = OTHER; note = 2'-O-methyl nucleotide
  modified_base 8..9: mod_base = OTHER; note = 2'Fluoro nucleotide
  modified_base 10..13: mod_base = OTHER; note = 2'-O-methyl nucleotide
  modified_base 14: mod_base = OTHER; note = 2'Fluoro nucleotide
  modified_base 15: mod_base = OTHER; note = 2'-O-methyl nucleotide
  modified_base 16: mod_base = OTHER; note = 2'Fluoro nucleotide
  modified_base 17..23: mod_base = OTHER; note = 2'-O-methyl nucleotide
  modified_base 21..23: mod_base = OTHER; note = Phosphorothioate linkage
cgggcatggtacaggtggtggga

SEQ ID NO: 480 - RNA, 23 nt, synthetic construct
  source 1..23: mol_type = other RNA
  modified_base 1: mod_base = OTHER; note = 2'-O-methyl nucleotide
  modified_base 2: mod_base = OTHER; note = 2'Fluoro nucleotide
  modified_base 1..3: mod_base = OTHER; note = Phosphorothioate linkage
  modified_base 3..5: mod_base = OTHER; note = 2'-O-methyl nucleotide
  modified_base 6: mod_base = OTHER; note = 2'Fluoro nucleotide
  modified_base 7: mod_base = OTHER; note = 2'-O-methyl nucleotide
  modified_base 8..9: mod_base = OTHER; note = 2'Fluoro nucleotide
  modified_base 10..13: mod_base = OTHER; note = 2'-O-methyl nucleotide
  modified_base 14: mod_base = OTHER; note = 2'Fluoro nucleotide
  modified_base 15: mod_base = OTHER; note = 2'-O-methyl nucleotide
  modified_base 16: mod_base = OTHER; note = 2'Fluoro nucleotide
  modified_base 17..23: mod_base = OTHER; note = 2'-O-methyl nucleotide
  modified_base 21..23: mod_base = OTHER; note = Phosphorothioate linkage
gcgggcatggtacaggtggtggg

SEQ ID NO: 481 - RNA, 23 nt, synthetic construct
  source 1..23: mol_type = other RNA
  modified_base 1: mod_base = OTHER; note = 2'-O-methyl nucleotide
  modified_base 2: mod_base = OTHER; note = 2'Fluoro nucleotide
  modified_base 1..3: mod_base = OTHER; note = Phosphorothioate linkage
  modified_base 3..5: mod_base = OTHER; note = 2'-O-methyl nucleotide
  modified_base 6: mod_base = OTHER; note = 2'Fluoro nucleotide
  modified_base 7: mod_base = OTHER; note = 2'-O-methyl nucleotide
  modified_base 8..9: mod_base = OTHER; note = 2'Fluoro nucleotide
  modified_base 10..13: mod_base = OTHER; note = 2'-O-methyl nucleotide
  modified_base 14: mod_base = OTHER; note = 2'Fluoro nucleotide
  modified_base 15: mod_base = OTHER; note = 2'-O-methyl nucleotide
  modified_base 16: mod_base = OTHER; note = 2'Fluoro nucleotide
  modified_base 17..23: mod_base = OTHER; note = 2'-O-methyl nucleotide
  modified_base 21..23: mod_base = OTHER; note = Phosphorothioate linkage
ggcgggcatggtacaggtggtgg

SEQ ID NO: 482 - RNA, 23 nt, synthetic construct
  source 1..23: mol_type = other RNA
  modified_base 1: mod_base = OTHER; note = 2'-O-methyl nucleotide
  modified_base 2: mod_base = OTHER; note = 2'Fluoro nucleotide
  modified_base 1..3: mod_base = OTHER; note = Phosphorothioate linkage
  modified_base 3..5: mod_base = OTHER; note = 2'-O-methyl nucleotide
  modified_base 6: mod_base = OTHER; note = 2'Fluoro nucleotide
  modified_base 7: mod_base = OTHER; note = 2'-O-methyl nucleotide
  modified_base 8..9: mod_base = OTHER; note = 2'Fluoro nucleotide
  modified_base 10..13: mod_base = OTHER; note = 2'-O-methyl nucleotide
  modified_base 14: mod_base = OTHER; note = 2'Fluoro nucleotide
  modified_base 15: mod_base = OTHER; note = 2'-O-methyl nucleotide
  modified_base 16: mod_base = OTHER; note = 2'Fluoro nucleotide
  modified_base 17..23: mod_base = OTHER; note = 2'-O-methyl nucleotide
  modified_base 21..23: mod_base = OTHER; note = Phosphorothioate linkage
aggcgggcatggtacaggtggtg

SEQ ID NO: 483 - RNA, 23 nt, synthetic construct
  source 1..23: mol_type = other RNA
  modified_base 1: mod_base = OTHER; note = 2'-O-methyl nucleotide
  modified_base 2: mod_base = OTHER; note = 2'Fluoro nucleotide
  modified_base 1..3: mod_base = OTHER; note = Phosphorothioate linkage
  modified_base 3..5: mod_base = OTHER; note = 2'-O-methyl nucleotide
  modified_base 6: mod_base = OTHER; note = 2'Fluoro nucleotide
  modified_base 7: mod_base = OTHER; note = 2'-O-methyl nucleotide
  modified_base 8..9: mod_base = OTHER; note = 2'Fluoro nucleotide
  modified_base 10..13: mod_base = OTHER; note = 2'-O-methyl nucleotide
  modified_base 14: mod_base = OTHER; note = 2'Fluoro nucleotide
  modified_base 15: mod_base = OTHER; note = 2'-O-methyl nucleotide
  modified_base 16: mod_base = OTHER; note = 2'Fluoro nucleotide
  modified_base 17..23: mod_base = OTHER; note = 2'-O-methyl nucleotide
  modified_base 21..23: mod_base = OTHER; note = Phosphorothioate linkage
caggcgggcatggtacaggtggt

SEQ ID NO: 484 - RNA, 23 nt, synthetic construct
  source 1..23: mol_type = other RNA
  modified_base 1: mod_base = OTHER; note = 2'-O-methyl nucleotide
  modified_base 2: mod_base = OTHER; note = 2'Fluoro nucleotide
  modified_base 1..3: mod_base = OTHER; note = Phosphorothioate linkage
  modified_base 3..5: mod_base = OTHER; note = 2'-O-methyl nucleotide
  modified_base 6: mod_base = OTHER; note = 2'Fluoro nucleotide
  modified_base 7: mod_base = OTHER; note = 2'-O-methyl nucleotide
  modified_base 8..9: mod_base = OTHER; note = 2'Fluoro nucleotide
  modified_base 10..13: mod_base = OTHER; note = 2'-O-methyl nucleotide
  modified_base 14: mod_base = OTHER; note = 2'Fluoro nucleotide
  modified_base 15: mod_base = OTHER; note = 2'-O-methyl nucleotide
  modified_base 16: mod_base = OTHER; note = 2'Fluoro nucleotide
  modified_base 17..23: mod_base = OTHER; note = 2'-O-methyl nucleotide
  modified_base 21..23: mod_base = OTHER; note = Phosphorothioate linkage
aaagagtgccaggaagggtgggg

SEQ ID NO: 485 - RNA, 23 nt, synthetic construct
  source 1..23: mol_type = other RNA
  modified_base 1: mod_base = OTHER; note = 2'-O-methyl nucleotide
  modified_base 2: mod_base = OTHER; note = 2'Fluoro nucleotide
  modified_base 1..3: mod_base = OTHER; note = Phosphorothioate linkage
  modified_base 3..5: mod_base = OTHER; note = 2'-O-methyl nucleotide
  modified_base 6: mod_base = OTHER; note = 2'Fluoro nucleotide
  modified_base 7: mod_base = OTHER; note = 2'-O-methyl nucleotide
  modified_base 8..9: mod_base = OTHER; note = 2'Fluoro nucleotide
  modified_base 10..13: mod_base = OTHER; note = 2'-O-methyl nucleotide
  modified_base 14: mod_base = OTHER; note = 2'Fluoro nucleotide
  modified_base 15: mod_base = OTHER; note = 2'-O-methyl nucleotide
  modified_base 16: mod_base = OTHER; note = 2'Fluoro nucleotide
  modified_base 17..23: mod_base = OTHER; note = 2'-O-methyl nucleotide
  modified_base 21..23: mod_base = OTHER; note = Phosphorothioate linkage
agcaaagagtgccaggaagggtg

SEQ ID NO: 486 - RNA, 23 nt, synthetic construct
  source 1..23: mol_type = other RNA
  modified_base 1: mod_base = OTHER; note = 2'-O-methyl nucleotide
  modified_base 2: mod_base = OTHER; note = 2'Fluoro nucleotide
  modified_base 1..3: mod_base = OTHER; note = Phosphorothioate linkage
  modified_base 3..5: mod_base = OTHER; note = 2'-O-methyl nucleotide
  modified_base 6: mod_base = OTHER; note = 2'Fluoro nucleotide
  modified_base 7: mod_base = OTHER; note = 2'-O-methyl nucleotide
  modified_base 8..9: mod_base = OTHER; note = 2'Fluoro nucleotide
  modified_base 10..13: mod_base = OTHER; note = 2'-O-methyl nucleotide
  modified_base 14: mod_base = OTHER; note = 2'Fluoro nucleotide
  modified_base 15: mod_base = OTHER; note = 2'-O-methyl nucleotide
  modified_base 16: mod_base = OTHER; note = 2'Fluoro nucleotide
  modified_base 17..23: mod_base = OTHER; note = 2'-O-methyl nucleotide
  modified_base 21..23: mod_base = OTHER; note = Phosphorothioate linkage
atcctcaagcaaagagtgccagg

SEQ ID NO: 487 - RNA, 23 nt, synthetic construct
  source 1..23: mol_type = other RNA
  modified_base 1: mod_base = OTHER; note = 2'-O-methyl nucleotide
  modified_base 2: mod_base = OTHER; note = 2'Fluoro nucleotide
  modified_base 1..3: mod_base = OTHER; note = Phosphorothioate linkage
  modified_base 3..5: mod_base = OTHER; note = 2'-O-methyl nucleotide
  modified_base 6: mod_base = OTHER; note = 2'Fluoro nucleotide
  modified_base 7: mod_base = OTHER; note = 2'-O-methyl nucleotide
  modified_base 8..9: mod_base = OTHER; note = 2'Fluoro nucleotide
  modified_base 10..13: mod_base = OTHER; note = 2'-O-methyl nucleotide
  modified_base 14: mod_base = OTHER; note = 2'Fluoro nucleotide
  modified_base 15: mod_base = OTHER; note = 2'-O-methyl nucleotide
  modified_base 16: mod_base = OTHER; note = 2'Fluoro nucleotide
  modified_base 17..23: mod_base = OTHER; note = 2'-O-methyl nucleotide
  modified_base 21..23: mod_base = OTHER; note = Phosphorothioate linkage
agatcctcaagcaaagagtgcca

SEQ ID NO: 488 - RNA, 23 nt, synthetic construct
  source 1..23: mol_type = other RNA
  modified_base 1: mod_base = OTHER; note = 2'-O-methyl nucleotide
  modified_base 2: mod_base = OTHER; note = 2'Fluoro nucleotide
  modified_base 1..3: mod_base = OTHER; note = Phosphorothioate linkage
  modified_base 3..5: mod_base = OTHER; note = 2'-O-methyl nucleotide
  modified_base 6: mod_base = OTHER; note = 2'Fluoro nucleotide
  modified_base 7: mod_base = OTHER; note = 2'-O-methyl nucleotide
  modified_base 8..9: mod_base = OTHER; note = 2'Fluoro nucleotide
  modified_base 10..13: mod_base = OTHER; note = 2'-O-methyl nucleotide
  modified_base 14: mod_base = OTHER; note = 2'Fluoro nucleotide
  modified_base 15: mod_base = OTHER; note = 2'-O-methyl nucleotide
  modified_base 16: mod_base = OTHER; note = 2'Fluoro nucleotide
  modified_base 17..23: mod_base = OTHER; note = 2'-O-methyl nucleotide
  modified_base 21..23: mod_base = OTHER; note = Phosphorothioate linkage
aagatcctcaagcaaagagtgcc

SEQ ID NO: 489 - RNA, 23 nt, synthetic construct
  source 1..23: mol_type = other RNA
  modified_base 1: mod_base = OTHER; note = 2'-O-methyl nucleotide
  modified_base 2: mod_base = OTHER; note = 2'Fluoro nucleotide
  modified_base 1..3: mod_base = OTHER; note = Phosphorothioate linkage
  modified_base 3..5: mod_base = OTHER; note = 2'-O-methyl nucleotide
  modified_base 6: mod_base = OTHER; note = 2'Fluoro nucleotide
  modified_base 7: mod_base = OTHER; note = 2'-O-methyl nucleotide
  modified_base 8..9: mod_base = OTHER; note = 2'Fluoro nucleotide
  modified_base 10..13: mod_base = OTHER; note = 2'-O-methyl nucleotide
  modified_base 14: mod_base = OTHER; note = 2'Fluoro nucleotide
  modified_base 15: mod_base = OTHER; note = 2'-O-methyl nucleotide
  modified_base 16: mod_base = OTHER; note = 2'Fluoro nucleotide
  modified_base 17..23: mod_base = OTHER; note = 2'-O-methyl nucleotide
  modified_base 21..23: mod_base = OTHER; note = Phosphorothioate linkage
tctcacccctcaagccactagag

SEQ ID NO: 490 - RNA, 23 nt, synthetic construct
  source 1..23: mol_type = other RNA
  modified_base 1: mod_base = OTHER; note = 2'-O-methyl nucleotide
  modified_base 2: mod_base = OTHER; note = 2'Fluoro nucleotide
  modified_base 1..3: mod_base = OTHER; note = Phosphorothioate linkage
  modified_base 3..5: mod_base = OTHER; note = 2'-O-methyl nucleotide
  modified_base 6: mod_base = OTHER; note = 2'Fluoro nucleotide
  modified_base 7: mod_base = OTHER; note = 2'-O-methyl nucleotide
  modified_base 8..9: mod_base = OTHER; note = 2'Fluoro nucleotide
  modified_base 10..13: mod_base = OTHER; note = 2'-O-methyl nucleotide
  modified_base 14: mod_base = OTHER; note = 2'Fluoro nucleotide
  modified_base 15: mod_base = OTHER; note = 2'-O-methyl nucleotide
  modified_base 16: mod_base = OTHER; note = 2'Fluoro nucleotide
  modified_base 17..23: mod_base = OTHER; note = 2'-O-methyl nucleotide
  modified_base 21..23: mod_base = OTHER; note = Phosphorothioate linkage
agacttctcacccctcaagccac

SEQ ID NO: 491 - RNA, 23 nt, synthetic construct
  source 1..23: mol_type = other RNA
  modified_base 1: mod_base = OTHER; note = 2'-O-methyl nucleotide
  modified_base 2: mod_base = OTHER; note = 2'Fluoro nucleotide
  modified_base 1..3: mod_base = OTHER; note = Phosphorothioate linkage
  modified_base 3..5: mod_base = OTHER; note = 2'-O-methyl nucleotide
  modified_base 6: mod_base = OTHER; note = 2'Fluoro nucleotide
  modified_base 7: mod_base = OTHER; note = 2'-O-methyl nucleotide
  modified_base 8..9: mod_base = OTHER; note = 2'Fluoro nucleotide
  modified_base 10..13: mod_base = OTHER; note = 2'-O-methyl nucleotide
  modified_base 14: mod_base = OTHER; note = 2'Fluoro nucleotide
  modified_base 15: mod_base = OTHER; note = 2'-O-methyl nucleotide
  modified_base 16: mod_base = OTHER; note = 2'Fluoro nucleotide
  modified_base 17..23: mod_base = OTHER; note = 2'-O-methyl nucleotide
  modified_base 21..23: mod_base = OTHER; note = Phosphorothioate linkage
agtttcaggacaccagacttctc

SEQ ID NO: 492 - RNA, 23 nt, synthetic construct
  source 1..23: mol_type = other RNA
  modified_base 1: mod_base = OTHER; note = 2'-O-methyl nucleotide
  modified_base 2: mod_base = OTHER; note = 2'Fluoro nucleotide
  modified_base 1..3: mod_base = OTHER; note = Phosphorothioate linkage
  modified_base 3..5: mod_base = OTHER; note = 2'-O-methyl nucleotide
  modified_base 6: mod_base = OTHER; note = 2'Fluoro nucleotide
  modified_base 7: mod_base = OTHER; note = 2'-O-methyl nucleotide
  modified_base 8..9: mod_base = OTHER; note = 2'Fluoro nucleotide
  modified_base 10..13: mod_base = OTHER; note = 2'-O-methyl nucleotide
  modified_base 14: mod_base = OTHER; note = 2'Fluoro nucleotide
  modified_base 15: mod_base = OTHER; note = 2'-O-methyl nucleotide
  modified_base 16: mod_base = OTHER; note = 2'Fluoro nucleotide
  modified_base 17..23: mod_base = OTHER; note = 2'-O-methyl nucleotide
  modified_base 21..23: mod_base = OTHER; note = Phosphorothioate linkage
agttgcagtttcaggacaccaga

SEQ ID NO: 493 - RNA, 23 nt, synthetic construct
  source 1..23: mol_type = other RNA
  modified_base 1: mod_base = OTHER; note = 2'-O-methyl nucleotide
  modified_base 2: mod_base = OTHER; note = 2'Fluoro nucleotide
  modified_base 1..3: mod_base = OTHER; note = Phosphorothioate linkage
  modified_base 3..5: mod_base = OTHER; note = 2'-O-methyl nucleotide
  modified_base 6: mod_base = OTHER; note = 2'Fluoro nucleotide
  modified_base 7: mod_base = OTHER; note = 2'-O-methyl nucleotide
  modified_base 8..9: mod_base = OTHER; note = 2'Fluoro nucleotide
  modified_base 10..13: mod_base = OTHER; note = 2'-O-methyl nucleotide
  modified_base 14: mod_base = OTHER; note = 2'Fluoro nucleotide
  modified_base 15: mod_base = OTHER; note = 2'-O-methyl nucleotide
  modified_base 16: mod_base = OTHER; note = 2'Fluoro nucleotide
  modified_base 17..23: mod_base = OTHER; note = 2'-O-methyl nucleotide
  modified_base 21..23: mod_base = OTHER; note = Phosphorothioate linkage
tagttgcagtttcaggacaccag

SEQ ID NO: 494 - RNA, 23 nt, synthetic construct
  source 1..23: mol_type = other RNA
  modified_base 1: mod_base = OTHER; note = 2'-O-methyl nucleotide
  modified_base 2: mod_base = OTHER; note = 2'Fluoro nucleotide
  modified_base 1..3: mod_base = OTHER; note = Phosphorothioate linkage
  modified_base 3..5: mod_base = OTHER; note = 2'-O-methyl nucleotide
  modified_base 6: mod_base = OTHER; note = 2'Fluoro nucleotide
  modified_base 7: mod_base = OTHER; note = 2'-O-methyl nucleotide
  modified_base 8..9: mod_base = OTHER; note = 2'Fluoro nucleotide
  modified_base 10..13: mod_base = OTHER; note = 2'-O-methyl nucleotide
  modified_base 14: mod_base = OTHER; note = 2'Fluoro nucleotide
  modified_base 15: mod_base = OTHER; note = 2'-O-methyl nucleotide
  modified_base 16: mod_base = OTHER; note = 2'Fluoro nucleotide
  modified_base 17..23: mod_base = OTHER; note = 2'-O-methyl nucleotide
  modified_base 21..23: mod_base = OTHER; note = Phosphorothioate linkage
cttaagctctaggaagggctgct

SEQ ID NO: 495 - RNA, 23 nt, synthetic construct
  source 1..23: mol_type = other RNA
  modified_base 1: mod_base = OTHER; note = 2'-O-methyl nucleotide
  modified_base 2: mod_base = OTHER; note = 2'Fluoro nucleotide
  modified_base 1..3: mod_base = OTHER; note = Phosphorothioate linkage
  modified_base 3..5: mod_base = OTHER; note = 2'-O-methyl nucleotide
  modified_base 6: mod_base = OTHER; note = 2'Fluoro nucleotide
  modified_base 7: mod_base = OTHER; note = 2'-O-methyl nucleotide
  modified_base 8..9: mod_base = OTHER; note = 2'Fluoro nucleotide
  modified_base 10..13: mod_base = OTHER; note = 2'-O-methyl nucleotide
  modified_base 14: mod_base = OTHER; note = 2'Fluoro nucleotide
  modified_base 15: mod_base = OTHER; note = 2'-O-methyl nucleotide
  modified_base 16: mod_base = OTHER; note = 2'Fluoro nucleotide
  modified_base 17..23: mod_base = OTHER; note = 2'-O-methyl nucleotide
  modified_base 21..23: mod_base = OTHER; note = Phosphorothioate linkage
atcttaagctctaggaagggctg

SEQ ID NO: 496 - RNA, 23 nt, synthetic construct
  source 1..23: mol_type = other RNA
  modified_base 1: mod_base = OTHER; note = 2'-O-methyl nucleotide
  modified_base 2: mod_base = OTHER; note = 2'Fluoro nucleotide
  modified_base 1..3: mod_base = OTHER; note = Phosphorothioate linkage
  modified_base 3..5: mod_base = OTHER; note = 2'-O-methyl nucleotide
  modified_base 6: mod_base = OTHER; note = 2'Fluoro nucleotide
  modified_base 7: mod_base = OTHER; note = 2'-O-methyl nucleotide
  modified_base 8..9: mod_base = OTHER; note = 2'Fluoro nucleotide
  modified_base 10..13: mod_base = OTHER; note = 2'-O-methyl nucleotide
  modified_base 14: mod_base = OTHER; note = 2'Fluoro nucleotide
  modified_base 15: mod_base = OTHER; note = 2'-O-methyl nucleotide
  modified_base 16: mod_base = OTHER; note = 2'Fluoro nucleotide
  modified_base 17..23: mod_base = OTHER; note = 2'-O-methyl nucleotide
  modified_base 21..23: mod_base = OTHER; note = Phosphorothioate linkage
attggctcggatcttaagctcta

SEQ ID NO: 497 - RNA, 23 nt, synthetic construct
  source 1..23: mol_type = other RNA
  modified_base 1: mod_base = OTHER; note = 2'-O-methyl nucleotide
  modified_base 2: mod_base = OTHER; note = 2'Fluoro nucleotide
  modified_base 1..3: mod_base = OTHER; note = Phosphorothioate linkage
  modified_base 3..5: mod_base = OTHER; note = 2'-O-methyl nucleotide
  modified_base 6: mod_base = OTHER; note = 2'Fluoro nucleotide
  modified_base 7: mod_base = OTHER; note = 2'-O-methyl nucleotide
  modified_base 8..9: mod_base = OTHER; note = 2'Fluoro nucleotide
  modified_base 10..13: mod_base = OTHER; note = 2'-O-methyl nucleotide
  modified_base 14: mod_base = OTHER; note = 2'Fluoro nucleotide
  modified_base 15: mod_base = OTHER; note = 2'-O-methyl nucleotide
  modified_base 16: mod_base = OTHER; note = 2'Fluoro nucleotide
  modified_base 17..23: mod_base = OTHER; note = 2'-O-methyl nucleotide
  modified_base 21..23: mod_base = OTHER; note = Phosphorothioate linkage
tcctggaagtctacgtaatggtc

SEQ ID NO: 498 - RNA, 23 nt, synthetic construct
  source 1..23: mol_type = other RNA
  modified_base 1: mod_base = OTHER; note = 2'-O-methyl nucleotide
  modified_base 2: mod_base = OTHER; note = 2'Fluoro nucleotide
  modified_base 1..3: mod_base = OTHER; note = Phosphorothioate linkage
  modified_base 3..5: mod_base = OTHER; note = 2'-O-methyl nucleotide
  modified_base 6: mod_base = OTHER; note = 2'Fluoro nucleotide
  modified_base 7: mod_base = OTHER; note = 2'-O-methyl nucleotide
  modified_base 8..9: mod_base = OTHER; note = 2'Fluoro nucleotide
  modified_base 10..13: mod_base = OTHER; note = 2'-O-methyl nucleotide
  modified_base 14: mod_base = OTHER; note = 2'Fluoro nucleotide
  modified_base 15: mod_base = OTHER; note = 2'-O-methyl nucleotide
  modified_base 16: mod_base = OTHER; note = 2'Fluoro nucleotide
  modified_base 17..23: mod_base = OTHER; note = 2'-O-methyl nucleotide
  modified_base 21..23: mod_base = OTHER; note = Phosphorothioate linkage
attcagctggtacccctcgggct

SEQ ID NO: 499 - RNA, 23 nt, synthetic construct
  source 1..23: mol_type = other RNA
  modified_base 1: mod_base = OTHER; note = 2'-O-methyl nucleotide
  modified_base 2: mod_base = OTHER; note = 2'Fluoro nucleotide
  modified_base 1..3: mod_base = OTHER; note = Phosphorothioate linkage
  modified_base 3..5: mod_base = OTHER; note = 2'-O-methyl nucleotide
  modified_base 6: mod_base = OTHER; note = 2'Fluoro nucleotide
  modified_base 7: mod_base = OTHER; note = 2'-O-methyl nucleotide
  modified_base 8..9: mod_base = OTHER; note = 2'Fluoro nucleotide
  modified_base 10..13: mod_base = OTHER; note = 2'-O-methyl nucleotide
  modified_base 14: mod_base = OTHER; note = 2'Fluoro nucleotide
  modified_base 15: mod_base = OTHER; note = 2'-O-methyl nucleotide
  modified_base 16: mod_base = OTHER; note = 2'Fluoro nucleotide
  modified_base 17..23: mod_base = OTHER; note = 2'-O-methyl nucleotide
  modified_base 21..23: mod_base = OTHER; note = Phosphorothioate linkage
taattcagctggtacccctcggg

SEQ ID NO: 500 - RNA, 23 nt, synthetic construct
  source 1..23: mol_type = other RNA
  modified_base 1: mod_base = OTHER; note = 2'-O-methyl nucleotide
  modified_base 2: mod_base = OTHER; note = 2'Fluoro nucleotide
  modified_base 1..3: mod_base = OTHER; note = Phosphorothioate linkage
  modified_base 3..5: mod_base = OTHER; note = 2'-O-methyl nucleotide
  modified_base 6: mod_base = OTHER; note = 2'Fluoro nucleotide
  modified_base 7: mod_base = OTHER; note = 2'-O-methyl nucleotide
  modified_base 8..9: mod_base = OTHER; note = 2'Fluoro nucleotide
  modified_base 10..13: mod_base = OTHER; note = 2'-O-methyl nucleotide
  modified_base 14: mod_base = OTHER; note = 2'Fluoro nucleotide
  modified_base 15: mod_base = OTHER; note = 2'-O-methyl nucleotide
  modified_base 16: mod_base = OTHER; note = 2'Fluoro nucleotide
  modified_base 17..23: mod_base = OTHER; note = 2'-O-methyl nucleotide
  modified_base 21..23: mod_base = OTHER; note = Phosphorothioate linkage
tgcagtaattcagctggtacccc

SEQ ID NO: 501 - RNA, 23 nt, synthetic construct
  source 1..23: mol_type = other RNA
  modified_base 1: mod_base = OTHER; note = 2'-O-methyl nucleotide
  modified_base 2: mod_base = OTHER; note = 2'Fluoro nucleotide
  modified_base 1..3: mod_base = OTHER; note = Phosphorothioate linkage
  modified_base 3..5: mod_base = OTHER; note = 2'-O-methyl nucleotide
  modified_base 6: mod_base = OTHER; note = 2'Fluoro nucleotide
  modified_base 7: mod_base = OTHER; note = 2'-O-methyl nucleotide
  modified_base 8..9: mod_base = OTHER; note = 2'Fluoro nucleotide
  modified_base 10..13: mod_base = OTHER; note = 2'-O-methyl nucleotide
  modified_base 14: mod_base = OTHER; note = 2'Fluoro nucleotide
  modified_base 15: mod_base = OTHER; note = 2'-O-methyl nucleotide
  modified_base 16: mod_base = OTHER; note = 2'Fluoro nucleotide
  modified_base 17..23: mod_base = OTHER; note = 2'-O-methyl nucleotide
  modified_base 21..23: mod_base = OTHER; note = Phosphorothioate linkage
ctgcagtaattcagctggtaccc

SEQ ID NO: 502 - RNA, 23 nt, synthetic construct
  source 1..23: mol_type = other RNA
  modified_base 1: mod_base = OTHER; note = 2'-O-methyl nucleotide
  modified_base 2: mod_base = OTHER; note = 2'Fluoro nucleotide
  modified_base 1..3: mod_base = OTHER; note = Phosphorothioate linkage
  modified_base 3..5: mod_base = OTHER; note = 2'-O-methyl nucleotide
  modified_base 6: mod_base = OTHER; note = 2'Fluoro nucleotide
  modified_base 7: mod_base = OTHER; note = 2'-O-methyl nucleotide
  modified_base 8..9: mod_base = OTHER; note = 2'Fluoro nucleotide
  modified_base 10..13: mod_base = OTHER; note = 2'-O-methyl nucleotide
  modified_base 14: mod_base = OTHER; note = 2'Fluoro nucleotide
  modified_base 15: mod_base = OTHER; note = 2'-O-methyl nucleotide
  modified_base 16: mod_base = OTHER; note = 2'Fluoro nucleotide
  modified_base 17..23: mod_base = OTHER; note = 2'-O-methyl nucleotide
  modified_base 21..23: mod_base = OTHER; note = Phosphorothioate linkage
actgcagtaattcagctggtacc

SEQ ID NO: 503 - RNA, 23 nt, synthetic construct
  source 1..23: mol_type = other RNA
  modified_base 1: mod_base = OTHER; note = 2'-O-methyl nucleotide
  modified_base 2: mod_base = OTHER; note = 2'Fluoro nucleotide
  modified_base 1..3: mod_base = OTHER; note = Phosphorothioate linkage
  modified_base 3..5: mod_base = OTHER; note = 2'-O-methyl nucleotide
  modified_base 6: mod_base = OTHER; note = 2'Fluoro nucleotide
  modified_base 7: mod_base = OTHER; note = 2'-O-methyl nucleotide
  modified_base 8..9: mod_base = OTHER; note = 2'Fluoro nucleotide
  modified_base 10..13: mod_base = OTHER; note = 2'-O-methyl nucleotide
  modified_base 14: mod_base = OTHER; note = 2'Fluoro nucleotide
  modified_base 15: mod_base = OTHER; note = 2'-O-methyl nucleotide
  modified_base 16: mod_base = OTHER; note = 2'Fluoro nucleotide
  modified_base 17..23: mod_base = OTHER; note = 2'-O-methyl nucleotide
  modified_base 21..23: mod_base = OTHER; note = Phosphorothioate linkage
cactgcagtaattcagctggtac

SEQ ID NO: 504 - RNA, 23 nt, synthetic construct
  source 1..23: mol_type = other RNA
  modified_base 1: mod_base = OTHER; note = 2'-O-methyl nucleotide
  modified_base 2: mod_base = OTHER; note = 2'Fluoro nucleotide
  modified_base 1..3: mod_base = OTHER; note = Phosphorothioate linkage
  modified_base 3..5: mod_base = OTHER; note = 2'-O-methyl nucleotide
  modified_base 6: mod_base = OTHER; note = 2'Fluoro nucleotide
  modified_base 7: mod_base = OTHER; note = 2'-O-methyl nucleotide
  modified_base 8..9: mod_base = OTHER; note = 2'Fluoro nucleotide
  modified_base 10..13: mod_base = OTHER; note = 2'-O-methyl nucleotide
  modified_base 14: mod_base = OTHER; note = 2'Fluoro nucleotide
  modified_base 15: mod_base = OTHER; note = 2'-O-methyl nucleotide
  modified_base 16: mod_base = OTHER; note = 2'Fluoro nucleotide
  modified_base 17..23: mod_base = OTHER; note = 2'-O-methyl nucleotide
  modified_base 21..23: mod_base = OTHER; note = Phosphorothioate linkage
ccactgcagtaattcagctggta

SEQ ID NO: 505 - RNA, 23 nt, synthetic construct
  source 1..23: mol_type = other RNA
  modified_base 1: mod_base = OTHER; note = 2'-O-methyl nucleotide
  modified_base 2: mod_base = OTHER; note = 2'Fluoro nucleotide
  modified_base 1..3: mod_base = OTHER; note = Phosphorothioate linkage
  modified_base 3..5: mod_base = OTHER; note = 2'-O-methyl nucleotide
  modified_base 6: mod_base = OTHER; note = 2'Fluoro nucleotide
  modified_base 7: mod_base = OTHER; note = 2'-O-methyl nucleotide
  modified_base 8..9: mod_base = OTHER; note = 2'Fluoro nucleotide
  modified_base 10..13: mod_base = OTHER; note = 2'-O-methyl nucleotide
  modified_base 14: mod_base = OTHER; note = 2'Fluoro nucleotide
  modified_base 15: mod_base = OTHER; note = 2'-O-methyl nucleotide
  modified_base 16: mod_base = OTHER; note = 2'Fluoro nucleotide
  modified_base 17..23: mod_base = OTHER; note = 2'-O-methyl nucleotide
  modified_base 21..23: mod_base = OTHER; note = Phosphorothioate linkage
gcccactgcagtaattcagctgg

SEQ ID NO: 506 - RNA, 23 nt, synthetic construct
  source 1..23: mol_type = other RNA
  modified_base 1: mod_base = OTHER; note = 2'-O-methyl nucleotide
  modified_base 2: mod_base = OTHER; note = 2'Fluoro nucleotide
  modified_base 1..3: mod_base = OTHER; note = Phosphorothioate linkage
  modified_base 3..5: mod_base = OTHER; note = 2'-O-methyl nucleotide
  modified_base 6: mod_base = OTHER; note = 2'Fluoro nucleotide
  modified_base 7: mod_base = OTHER; note = 2'-O-methyl nucleotide
  modified_base 8..9: mod_base = OTHER; note = 2'Fluoro nucleotide
  modified_base 10..13: mod_base = OTHER; note = 2'-O-methyl nucleotide
  modified_base 14: mod_base = OTHER; note = 2'Fluoro nucleotide
  modified_base 15: mod_base = OTHER; note = 2'-O-methyl nucleotide
  modified_base 16: mod_base = OTHER; note = 2'Fluoro nucleotide
  modified_base 17..23: mod_base = OTHER; note = 2'-O-methyl nucleotide
  modified_base 21..23: mod_base = OTHER; note = Phosphorothioate linkage
tgcccactgcagtaattcagctg

SEQ ID NO: 507 - RNA, 23 nt, synthetic construct
  source 1..23: mol_type = other RNA
  modified_base 1: mod_base = OTHER; note = 2'-O-methyl nucleotide
  modified_base 2: mod_base = OTHER; note = 2'Fluoro nucleotide
  modified_base 1..3: mod_base = OTHER; note = Phosphorothioate linkage
  modified_base 3..5: mod_base = OTHER; note = 2'-O-methyl nucleotide
  modified_base 6: mod_base = OTHER; note = 2'Fluoro nucleotide
  modified_base 7: mod_base = OTHER; note = 2'-O-methyl nucleotide
  modified_base 8..9: mod_base = OTHER; note = 2'Fluoro nucleotide
  modified_base 10..13: mod_base = OTHER; note = 2'-O-methyl nucleotide
  modified_base 14: mod_base = OTHER; note = 2'Fluoro nucleotide
  modified_base 15: mod_base = OTHER; note = 2'-O-methyl nucleotide
  modified_base 16: mod_base = OTHER; note = 2'Fluoro nucleotide
  modified_base 17..23: mod_base = OTHER; note = 2'-O-methyl nucleotide
  modified_base 21..23: mod_base = OTHER; note = Phosphorothioate linkage
ctgcccactgcagtaattcagct

SEQ ID NO: 508 - RNA, 23 nt, synthetic construct
  source 1..23: mol_type = other RNA
  modified_base 1: mod_base = OTHER; note = 2'-O-methyl nucleotide
  modified_base 2: mod_base = OTHER; note = 2'Fluoro nucleotide
  modified_base 1..3: mod_base = OTHER; note = Phosphorothioate linkage
  modified_base 3..5: mod_base = OTHER; note = 2'-O-methyl nucleotide
  modified_base 6: mod_base = OTHER; note = 2'Fluoro nucleotide
  modified_base 7: mod_base = OTHER; note = 2'-O-methyl nucleotide
  modified_base 8..9: mod_base = OTHER; note = 2'Fluoro nucleotide
  modified_base 10..13: mod_base = OTHER; note = 2'-O-methyl nucleotide
  modified_base 14: mod_base = OTHER; note = 2'Fluoro nucleotide
  modified_base 15: mod_base = OTHER; note = 2'-O-methyl nucleotide
  modified_base 16: mod_base = OTHER; note = 2'Fluoro nucleotide
  modified_base 17..23: mod_base = OTHER; note = 2'-O-methyl nucleotide
  modified_base 21..23: mod_base = OTHER; note = Phosphorothioate linkage
ggcactgcccactgcagtaattc

SEQ ID NO: 509 - RNA, 23 nt, synthetic construct
  source 1..23: mol_type = other RNA
  modified_base 1: mod_base = OTHER; note = 2'-O-methyl nucleotide
  modified_base 2: mod_base = OTHER; note = 2'Fluoro nucleotide
  modified_base 1..3: mod_base = OTHER; note = Phosphorothioate linkage
  modified_base 3..5: mod_base = OTHER; note = 2'-O-methyl nucleotide
  modified_base 6: mod_base = OTHER; note = 2'Fluoro nucleotide
  modified_base 7: mod_base = OTHER; note = 2'-O-methyl nucleotide
  modified_base 8..9: mod_base = OTHER; note = 2'Fluoro nucleotide
  modified_base 10..13: mod_base = OTHER; note = 2'-O-methyl nucleotide
  modified_base 14: mod_base = OTHER; note = 2'Fluoro nucleotide
  modified_base 15: mod_base = OTHER; note = 2'-O-methyl nucleotide
  modified_base 16: mod_base = OTHER; note = 2'Fluoro nucleotide
  modified_base 17..23: mod_base = OTHER; note = 2'-O-methyl nucleotide
  modified_base 21..23: mod_base = OTHER; note = Phosphorothioate linkage
atggaaagaggcagcaatgcctg

SEQ ID NO: 510 - RNA, 23 nt, synthetic construct
  source 1..23: mol_type = other RNA
  modified_base 1: mod_base = OTHER; note = 2'-O-methyl nucleotide
  modified_base 2: mod_base = OTHER; note = 2'Fluoro nucleotide
  modified_base 1..3: mod_base = OTHER; note = Phosphorothioate linkage
  modified_base 3..5: mod_base = OTHER; note = 2'-O-methyl nucleotide
  modified_base 6: mod_base = OTHER; note = 2'Fluoro nucleotide
  modified_base 7: mod_base = OTHER; note = 2'-O-methyl nucleotide
  modified_base 8..9: mod_base = OTHER; note = 2'Fluoro nucleotide
  modified_base 10..13: mod_base = OTHER; note = 2'-O-methyl nucleotide
  modified_base 14: mod_base = OTHER; note = 2'Fluoro nucleotide
  modified_base 15: mod_base = OTHER; note = 2'-O-methyl nucleotide
  modified_base 16: mod_base = OTHER; note = 2'Fluoro nucleotide
  modified_base 17..23: mod_base = OTHER; note = 2'-O-methyl nucleotide
  modified_base 21..23: mod_base = OTHER; note = Phosphorothioate linkage
aatggaaagaggcagcaatgcct

SEQ ID NO: 511 - RNA, 23 nt, synthetic construct
  source 1..23: mol_type = other RNA
  modified_base 1: mod_base = OTHER; note = 2'-O-methyl nucleotide
  modified_base 2: mod_base = OTHER; note = 2'Fluoro nucleotide
  modified_base 1..3: mod_base = OTHER; note = Phosphorothioate linkage
  modified_base 3..5: mod_base = OTHER; note = 2'-O-methyl nucleotide
  modified_base 6: mod_base = OTHER; note = 2'Fluoro nucleotide
  modified_base 7: mod_base = OTHER; note = 2'-O-methyl nucleotide
  modified_base 8..9: mod_base = OTHER; note = 2'Fluoro nucleotide
  modified_base 10..13: mod_base = OTHER; note = 2'-O-methyl nucleotide
  modified_base 14: mod_base = OTHER; note = 2'Fluoro nucleotide
  modified_base 15: mod_base = OTHER; note = 2'-O-methyl nucleotide
  modified_base 16: mod_base = OTHER; note = 2'Fluoro nucleotide
  modified_base 17..23: mod_base = OTHER; note = 2'-O-methyl nucleotide
  modified_base 21..23: mod_base = OTHER; note = Phosphorothioate linkage
aagacggcagaatggaaagaggc

SEQ ID NO: 512 - RNA, 23 nt, synthetic construct
  source 1..23: mol_type = other RNA
  modified_base 1: mod_base = OTHER; note = 2'-O-methyl nucleotide
  modified_base 2: mod_base = OTHER; note = 2'Fluoro nucleotide
  modified_base 1..3: mod_base = OTHER; note = Phosphorothioate linkage
  modified_base 3..5: mod_base = OTHER; note = 2'-O-methyl nucleotide
  modified_base 6: mod_base = OTHER; note = 2'Fluoro nucleotide
  modified_base 7: mod_base = OTHER; note = 2'-O-methyl nucleotide
  modified_base 8..9: mod_base = OTHER; note = 2'Fluoro nucleotide
  modified_base 10..13: mod_base = OTHER; note = 2'-O-methyl nucleotide
  modified_base 14: mod_base = OTHER; note = 2'Fluoro nucleotide
  modified_base 15: mod_base = OTHER; note = 2'-O-methyl nucleotide
  modified_base 16: mod_base = OTHER; note = 2'Fluoro nucleotide
  modified_base 17..23: mod_base = OTHER; note = 2'-O-methyl nucleotide
  modified_base 21..23: mod_base = OTHER; note = Phosphorothioate linkage
tgttggctttgaggaggctgaag

SEQ ID NO: 513 - RNA, 23 nt, synthetic construct
  source 1..23: mol_type = other RNA
  modified_base 1: mod_base = OTHER; note = 2'-O-methyl nucleotide
  modified_base 2: mod_base = OTHER; note = 2'Fluoro nucleotide
  modified_base 1..3: mod_base = OTHER; note = Phosphorothioate linkage
  modified_base 3..5: mod_base = OTHER; note = 2'-O-methyl nucleotide
  modified_base 6: mod_base = OTHER; note = 2'Fluoro nucleotide
  modified_base 7: mod_base = OTHER; note = 2'-O-methyl nucleotide
  modified_base 8..9: mod_base = OTHER; note = 2'Fluoro nucleotide
  modified_base 10..13: mod_base = OTHER; note = 2'-O-methyl nucleotide
  modified_base 14: mod_base = OTHER; note = 2'Fluoro nucleotide
  modified_base 15: mod_base = OTHER; note = 2'-O-methyl nucleotide
  modified_base 16: mod_base = OTHER; note = 2'Fluoro nucleotide
  modified_base 17..23: mod_base = OTHER; note = 2'-O-methyl nucleotide
  modified_base 21..23: mod_base = OTHER; note = Phosphorothioate linkage
ttgttggctttgaggaggctgaa

SEQ ID NO: 514 - RNA, 23 nt, synthetic construct
  source 1..23: mol_type = other RNA
  modified_base 1: mod_base = OTHER; note = 2'-O-methyl nucleotide
  modified_base 2: mod_base = OTHER; note = 2'Fluoro nucleotide
  modified_base 1..3: mod_base = OTHER; note = Phosphorothioate linkage
  modified_base 3..5: mod_base = OTHER; note = 2'-O-methyl nucleotide
  modified_base 6: mod_base = OTHER; note = 2'Fluoro nucleotide
  modified_base 7: mod_base = OTHER; note = 2'-O-methyl nucleotide
  modified_base 8..9: mod_base = OTHER; note = 2'Fluoro nucleotide
  modified_base 10..13: mod_base = OTHER; note = 2'-O-methyl nucleotide
  modified_base 14: mod_base = OTHER; note = 2'Fluoro nucleotide
  modified_base 15: mod_base = OTHER; note = 2'-O-methyl nucleotide
  modified_base 16: mod_base = OTHER; note = 2'Fluoro nucleotide
  modified_base 17..23: mod_base = OTHER; note = 2'-O-methyl nucleotide
  modified_base 21..23: mod_base = OTHER; note = Phosphorothioate linkage
aaggattgttggctttgaggagg

SEQ ID NO: 515 - RNA, 23 nt, synthetic construct
  source 1..23: mol_type = other RNA
  modified_base 1: mod_base = OTHER; note = 2'-O-methyl nucleotide
  modified_base 2: mod_base = OTHER; note = 2'Fluoro nucleotide
  modified_base 1..3: mod_base = OTHER; note = Phosphorothioate linkage
  modified_base 3..5: mod_base = OTHER; note = 2'-O-methyl nucleotide
  modified_base 6: mod_base = OTHER; note = 2'Fluoro nucleotide
  modified_base 7: mod_base = OTHER; note = 2'-O-methyl nucleotide
  modified_base 8..9: mod_base = OTHER; note = 2'Fluoro nucleotide
  modified_base 10..13: mod_base = OTHER; note = 2'-O-methyl nucleotide
  modified_base 14: mod_base = OTHER; note = 2'Fluoro nucleotide
  modified_base 15: mod_base = OTHER; note = 2'-O-methyl nucleotide
  modified_base 16: mod_base = OTHER; note = 2'Fluoro nucleotide
  modified_base 17..23: mod_base = OTHER; note = 2'-O-methyl nucleotide
  modified_base 21..23: mod_base = OTHER; note = Phosphorothioate linkage
atgatccaggtagaggagagaga

SEQ ID NO: 516 - RNA, 23 nt, synthetic construct
  source 1..23: mol_type = other RNA
  modified_base 1: mod_base = OTHER; note = 2'-O-methyl nucleotide
  modified_base 2: mod_base = OTHER; note = 2'Fluoro nucleotide
  modified_base 1..3: mod_base = OTHER; note = Phosphorothioate linkage
  modified_base 3..5: mod_base = OTHER; note = 2'-O-methyl nucleotide
  modified_base 6: mod_base = OTHER; note = 2'Fluoro nucleotide
  modified_base 7: mod_base = OTHER; note = 2'-O-methyl nucleotide
  modified_base 8..9: mod_base = OTHER; note = 2'Fluoro nucleotide
  modified_base 10..13: mod_base = OTHER; note = 2'-O-methyl nucleotide
  modified_base 14: mod_base = OTHER; note = 2'Fluoro nucleotide
  modified_base 15: mod_base = OTHER; note = 2'-O-methyl nucleotide
  modified_base 16: mod_base = OTHER; note = 2'Fluoro nucleotide
  modified_base 17..23: mod_base = OTHER; note = 2'-O-methyl nucleotide
  modified_base 21..23: mod_base = OTHER; note = Phosphorothioate linkage
ttatgatccaggtagaggagaga

SEQ ID NO: 517 - RNA, 23 nt, synthetic construct
  source 1..23: mol_type = other RNA
  modified_base 1: mod_base = OTHER; note = 2'-O-methyl nucleotide
  modified_base 2: mod_base = OTHER; note = 2'Fluoro nucleotide
  modified_base 1..3: mod_base = OTHER; note = Phosphorothioate linkage
  modified_base 3..5: mod_base = OTHER; note = 2'-O-methyl nucleotide
  modified_base 6: mod_base = OTHER; note = 2'Fluoro nucleotide
  modified_base 7: mod_base = OTHER; note = 2'-O-methyl nucleotide
  modified_base 8..9: mod_base = OTHER; note = 2'Fluoro nucleotide
  modified_base 10..13: mod_base = OTHER; note = 2'-O-methyl nucleotide
  modified_base 14: mod_base = OTHER; note = 2'Fluoro nucleotide
  modified_base 15: mod_base = OTHER; note = 2'-O-methyl nucleotide
  modified_base 16: mod_base = OTHER; note = 2'Fluoro nucleotide
  modified_base 17..23: mod_base = OTHER; note = 2'-O-methyl nucleotide
  modified_base 21..23: mod_base = OTHER; note = Phosphorothioate linkage
attatgatccaggtagaggagag

SEQ ID NO: 518 - RNA, 23 nt, synthetic construct
  source 1..23: mol_type = other RNA
  modified_base 1: mod_base = OTHER; note = 2'-O-methyl nucleotide
  modified_base 2: mod_base = OTHER; note = 2'Fluoro nucleotide
  modified_base 1..3: mod_base = OTHER; note = Phosphorothioate linkage
  modified_base 3..5: mod_base = OTHER; note = 2'-O-methyl nucleotide
  modified_base 6: mod_base = OTHER; note = 2'Fluoro nucleotide
  modified_base 7: mod_base = OTHER; note = 2'-O-methyl nucleotide
  modified_base 8..9: mod_base = OTHER; note = 2'Fluoro nucleotide
  modified_base 10..13: mod_base = OTHER; note = 2'-O-methyl nucleotide
  modified_base 14: mod_base = OTHER; note = 2'Fluoro nucleotide
  modified_base 15: mod_base = OTHER; note = 2'-O-methyl nucleotide
  modified_base 16: mod_base = OTHER; note = 2'Fluoro nucleotide
  modified_base 17..23: mod_base = OTHER; note = 2'-O-methyl nucleotide
  modified_base 21..23: mod_base = OTHER; note = Phosphorothioate linkage
attgccattatgatccaggtaga

SEQ ID NO: 519 - RNA, 23 nt, synthetic construct
  source 1..23: mol_type = other RNA
  modified_base 1: mod_base = OTHER; note = 2'-O-methyl nucleotide
  modified_base 2: mod_base = OTHER; note = 2'Fluoro nucleotide
  modified_base 1..3: mod_base = OTHER; note = Phosphorothioate linkage
  modified_base 3..5: mod_base = OTHER; note = 2'-O-methyl nucleotide
  modified_base 6: mod_base = OTHER; note = 2'Fluoro nucleotide
  modified_base 7: mod_base = OTHER; note = 2'-O-methyl nucleotide
  modified_base 8..9: mod_base = OTHER; note = 2'Fluoro nucleotide
  modified_base 10..13: mod_base = OTHER; note = 2'-O-methyl nucleotide
  modified_base 14: mod_base = OTHER; note = 2'Fluoro nucleotide
  modified_base 15: mod_base = OTHER; note = 2'-O-methyl nucleotide
  modified_base 16: mod_base = OTHER; note = 2'Fluoro nucleotide
  modified_base 17..23: mod_base = OTHER; note = 2'-O-methyl nucleotide
  modified_base 21..23: mod_base = OTHER; note = Phosphorothioate linkage
acattgccattatgatccaggta

SEQ ID NO: 520 - RNA, 23 nt, synthetic construct
  source 1..23: mol_type = other RNA
  modified_base 1: mod_base = OTHER; note = 2'-O-methyl nucleotide
  modified_base 2: mod_base = OTHER; note = 2'Fluoro nucleotide
  modified_base 1..3: mod_base = OTHER; note = Phosphorothioate linkage
  modified_base 3..5: mod_base = OTHER; note = 2'-O-methyl nucleotide
  modified_base 6: mod_base = OTHER; note = 2'Fluoro nucleotide
  modified_base 7: mod_base = OTHER; note = 2'-O-methyl nucleotide
  modified_base 8..9: mod_base = OTHER; note = 2'Fluoro nucleotide
  modified_base 10..13: mod_base = OTHER; note = 2'-O-methyl nucleotide
  modified_base 14: mod_base = OTHER; note = 2'Fluoro nucleotide
  modified_base 15: mod_base = OTHER; note = 2'-O-methyl nucleotide
  modified_base 16: mod_base = OTHER; note = 2'Fluoro nucleotide
  modified_base 17..23: mod_base = OTHER; note = 2'-O-methyl nucleotide
  modified_base 21..23: mod_base = OTHER; note = Phosphorothioate linkage
tgaccacattgccattatgatcc

SEQ ID NO: 521 - RNA, 23 nt, synthetic construct
  source 1..23: mol_type = other RNA
  modified_base 1: mod_base = OTHER; note = 2'-O-methyl nucleotide
  modified_base 2: mod_base = OTHER; note = 2'Fluoro nucleotide
  modified_base 1..3: mod_base = OTHER; note = Phosphorothioate linkage
  modified_base 3..5: mod_base = OTHER; note = 2'-O-methyl nucleotide
  modified_base 6: mod_base = OTHER; note = 2'Fluoro nucleotide
  modified_base 7: mod_base = OTHER; note = 2'-O-methyl nucleotide
  modified_base 8..9: mod_base = OTHER; note = 2'Fluoro nucleotide
  modified_base 10..13: mod_base = OTHER; note = 2'-O-methyl nucleotide
  modified_base 14: mod_base = OTHER; note = 2'Fluoro nucleotide
  modified_base 15: mod_base = OTHER; note = 2'-O-methyl nucleotide
  modified_base 16: mod_base = OTHER; note = 2'Fluoro nucleotide
  modified_base 17..23: mod_base = OTHER; note = 2'-O-methyl nucleotide
  modified_base 21..23: mod_base = OTHER; note = Phosphorothioate linkage
ttgaccacattgccattatgatc

SEQ ID NO: 522 - RNA, 23 nt, synthetic construct
  source 1..23: mol_type = other RNA
  modified_base 1: mod_base = OTHER; note = 2'-O-methyl nucleotide
  modified_base 2: mod_base = OTHER; note = 2'Fluoro nucleotide
  modified_base 1..3: mod_base = OTHER; note = Phosphorothioate linkage
  modified_base 3..5: mod_base = OTHER; note = 2'-O-methyl nucleotide
  modified_base 6: mod_base = OTHER; note = 2'Fluoro nucleotide
  modified_base 7: mod_base = OTHER; note = 2'-O-methyl nucleotide
  modified_base 8..9: mod_base = OTHER; note = 2'Fluoro nucleotide
  modified_base 10..13: mod_base = OTHER; note = 2'-O-methyl nucleotide
  modified_base 14: mod_base = OTHER; note = 2'Fluoro nucleotide
  modified_base 15: mod_base = OTHER; note = 2'-O-methyl nucleotide
  modified_base 16: mod_base = OTHER; note = 2'Fluoro nucleotide
  modified_base 17..23: mod_base = OTHER; note = 2'-O-methyl nucleotide
  modified_base 21..23: mod_base = OTHER; note = Phosphorothioate linkage
cttgaccacattgccattatgat

SEQ ID NO: 523 - RNA, 23 nt, synthetic construct
  source 1..23: mol_type = other RNA
  modified_base 1: mod_base = OTHER; note = 2'-O-methyl nucleotide
  modified_base 2: mod_base = OTHER; note = 2'Fluoro nucleotide
  modified_base 1..3: mod_base = OTHER; note = Phosphorothioate linkage
  modified_base 3..5: mod_base = OTHER; note = 2'-O-methyl nucleotide
  modified_base 6: mod_base = OTHER; note = 2'Fluoro nucleotide
  modified_base 7: mod_base = OTHER; note = 2'-O-methyl nucleotide
  modified_base 8..9: mod_base = OTHER; note = 2'Fluoro nucleotide
  modified_base 10..13: mod_base = OTHER; note = 2'-O-methyl nucleotide
  modified_base 14: mod_base = OTHER; note = 2'Fluoro nucleotide
  modified_base 15: mod_base = OTHER; note = 2'-O-methyl nucleotide
  modified_base 16: mod_base = OTHER; note = 2'Fluoro nucleotide
  modified_base 17..23: mod_base = OTHER; note = 2'-O-methyl nucleotide
  modified_base 21..23: mod_base = OTHER; note = Phosphorothioate linkage
tcttgaccacattgccattatga

SEQ ID NO: 524 - RNA, 23 nt, synthetic construct
  source 1..23: mol_type = other RNA
  modified_base 1: mod_base = OTHER; note = 2'-O-methyl nucleotide
  modified_base 2: mod_base = OTHER; note = 2'Fluoro nucleotide
  modified_base 1..3: mod_base = OTHER; note = Phosphorothioate linkage
  modified_base 3..5: mod_base = OTHER; note = 2'-O-methyl nucleotide
  modified_base 6: mod_base = OTHER; note = 2'Fluoro nucleotide
  modified_base 7: mod_base = OTHER; note = 2'-O-methyl nucleotide
  modified_base 8..9: mod_base = OTHER; note = 2'Fluoro nucleotide
  modified_base 10..13: mod_base = OTHER; note = 2'-O-methyl nucleotide
  modified_base 14: mod_base = OTHER; note = 2'Fluoro nucleotide
  modified_base 15: mod_base = OTHER; note = 2'-O-methyl nucleotide
  modified_base 16: mod_base = OTHER; note = 2'Fluoro nucleotide
  modified_base 17..23: mod_base = OTHER; note = 2'-O-methyl nucleotide
  modified_base 21..23: mod_base = OTHER; note = Phosphorothioate linkage
gtcttgaccacattgccattatg

SEQ ID NO: 525 - RNA, 23 nt, synthetic construct
  source 1..23: mol_type = other RNA
  modified_base 1: mod_base = OTHER; note = 2'-O-methyl nucleotide
  modified_base 2: mod_base = OTHER; note = 2'Fluoro nucleotide
  modified_base 1..3: mod_base = OTHER; note = Phosphorothioate linkage
  modified_base 3..5: mod_base = OTHER; note = 2'-O-methyl nucleotide
  modified_base 6: mod_base = OTHER; note = 2'Fluoro nucleotide
  modified_base 7: mod_base = OTHER; note = 2'-O-methyl nucleotide
  modified_base 8..9: mod_base = OTHER; note = 2'Fluoro nucleotide
  modified_base 10..13: mod_base = OTHER; note = 2'-O-methyl nucleotide
  modified_base 14: mod_base = OTHER; note = 2'Fluoro nucleotide
  modified_base 15: mod_base = OTHER; note = 2'-O-methyl nucleotide
  modified_base 16: mod_base = OTHER; note = 2'Fluoro nucleotide
  modified_base 17..23: mod_base = OTHER; note = 2'-O-methyl nucleotide
  modified_base 21..23: mod_base = OTHER; note = Phosphorothioate linkage
cgtcttgaccacattgccattat

SEQ ID NO: 526 - RNA, 23 nt, synthetic construct
  source 1..23: mol_type = other RNA
  modified_base 1: mod_base = OTHER; note = 2'-O-methyl nucleotide
  modified_base 2: mod_base = OTHER; note = 2'Fluoro nucleotide
  modified_base 1..3: mod_base = OTHER; note = Phosphorothioate linkage
  modified_base 3..5: mod_base = OTHER; note = 2'-O-methyl nucleotide
  modified_base 6: mod_base = OTHER; note = 2'Fluoro nucleotide
  modified_base 7: mod_base = OTHER; note = 2'-O-methyl nucleotide
  modified_base 8..9: mod_base = OTHER; note = 2'Fluoro nucleotide
  modified_base 10..13: mod_base = OTHER; note = 2'-O-methyl nucleotide
  modified_base 14: mod_base = OTHER; note = 2'Fluoro nucleotide
  modified_base 15: mod_base = OTHER; note = 2'-O-methyl nucleotide
  modified_base 16: mod_base = OTHER; note = 2'Fluoro nucleotide
  modified_base 17..23: mod_base = OTHER; note = 2'-O-methyl nucleotide
  modified_base 21..23: mod_base = OTHER; note = Phosphorothioate linkage
acatccgtcttgaccacattgcc

SEQ ID NO: 527 - RNA, 23 nt, synthetic construct
  source 1..23: mol_type = other RNA
  modified_base 1: mod_base = OTHER; note = 2'-O-methyl nucleotide
  modified_base 2: mod_base = OTHER; note = 2'Fluoro nucleotide
  modified_base 1..3: mod_base = OTHER; note = Phosphorothioate linkage
  modified_base 3..5: mod_base = OTHER; note = 2'-O-methyl nucleotide
  modified_base 6: mod_base = OTHER; note = 2'Fluoro nucleotide
  modified_base 7: mod_base = OTHER; note = 2'-O-methyl nucleotide
  modified_base 8..9: mod_base = OTHER; note = 2'Fluoro nucleotide
  modified_base 10..13: mod_base = OTHER; note = 2'-O-methyl nucleotide
  modified_base 14: mod_base = OTHER; note = 2'Fluoro nucleotide
  modified_base 15: mod_base = OTHER; note = 2'-O-methyl nucleotide
  modified_base 16: mod_base = OTHER; note = 2'Fluoro nucleotide
  modified_base 17..23: mod_base = OTHER; note = 2'-O-methyl nucleotide
  modified_base 21..23: mod_base = OTHER; note = Phosphorothioate linkage
atatctggcacatccgtcttgac

SEQ ID NO: 528 - RNA, 23 nt, synthetic construct
  source 1..23: mol_type = other RNA
  modified_base 1: mod_base = OTHER; note = 2'-O-methyl nucleotide
  modified_base 2: mod_base = OTHER; note = 2'Fluoro nucleotide
  modified_base 1..3: mod_base = OTHER; note = Phosphorothioate linkage
  modified_base 3..5: mod_base = OTHER; note = 2'-O-methyl nucleotide
  modified_base 6: mod_base = OTHER; note = 2'Fluoro nucleotide
  modified_base 7: mod_base = OTHER; note = 2'-O-methyl nucleotide
  modified_base 8..9: mod_base = OTHER; note = 2'Fluoro nucleotide
  modified_base 10..13: mod_base = OTHER; note = 2'-O-methyl nucleotide
  modified_base 14: mod_base = OTHER; note = 2'Fluoro nucleotide
  modified_base 15: mod_base = OTHER; note = 2'-O-methyl nucleotide
  modified_base 16: mod_base = OTHER; note = 2'Fluoro nucleotide
  modified_base 17..23: mod_base = OTHER; note = 2'-O-methyl nucleotide
  modified_base 21..23: mod_base = OTHER; note = Phosphorothioate linkage
ctagctgcagccacaggcctcca

SEQ ID NO: 529 - RNA, 23 nt, synthetic construct
  source 1..23: mol_type = other RNA
  modified_base 1: mod_base = OTHER; note = 2'-O-methyl nucleotide
  modified_base 2: mod_base = OTHER; note = 2'Fluoro nucleotide
  modified_base 1..3: mod_base = OTHER; note = Phosphorothioate linkage
  modified_base 3..5: mod_base = OTHER; note = 2'-O-methyl nucleotide
  modified_base 6: mod_base = OTHER; note = 2'Fluoro nucleotide
  modified_base 7: mod_base = OTHER; note = 2'-O-methyl nucleotide
  modified_base 8..9: mod_base = OTHER; note = 2'Fluoro nucleotide
  modified_base 10..13: mod_base = OTHER; note = 2'-O-methyl nucleotide
  modified_base 14: mod_base = OTHER; note = 2'Fluoro nucleotide
  modified_base 15: mod_base = OTHER; note = 2'-O-methyl nucleotide
  modified_base 16: mod_base = OTHER; note = 2'Fluoro nucleotide
  modified_base 17..23: mod_base = OTHER; note = 2'-O-methyl nucleotide
  modified_base 21..23: mod_base = OTHER; note = Phosphorothioate linkage
gctagctgcagccacaggcctcc

SEQ ID NO: 530 - RNA, 23 nt, synthetic construct
  source 1..23: mol_type = other RNA
  modified_base 1: mod_base = OTHER; note = 2'-O-methyl nucleotide
  modified_base 2: mod_base = OTHER; note = 2'Fluoro nucleotide
  modified_base 1..3: mod_base = OTHER; note = Phosphorothioate linkage
  modified_base 3..5: mod_base = OTHER; note = 2'-O-methyl nucleotide
  modified_base 6: mod_base = OTHER; note = 2'Fluoro nucleotide
  modified_base 7: mod_base = OTHER; note = 2'-O-methyl nucleotide
  modified_base 8..9: mod_base = OTHER; note = 2'Fluoro nucleotide
  modified_base 10..13: mod_base = OTHER; note = 2'-O-methyl nucleotide
  modified_base 14: mod_base = OTHER; note = 2'Fluoro nucleotide
  modified_base 15: mod_base = OTHER; note = 2'-O-methyl nucleotide
  modified_base 16: mod_base = OTHER; note = 2'Fluoro nucleotide
  modified_base 17..23: mod_base = OTHER; note = 2'-O-methyl nucleotide
  modified_base 21..23: mod_base = OTHER; note = Phosphorothioate linkage
tgctagctgcagccacaggcctc

SEQ ID NO: 531 - RNA, 23 nt, synthetic construct
  source 1..23: mol_type = other RNA
  modified_base 1: mod_base = OTHER; note = 2'-O-methyl nucleotide
  modified_base 2: mod_base = OTHER; note = 2'Fluoro nucleotide
  modified_base 1..3: mod_base = OTHER; note = Phosphorothioate linkage
  modified_base 3..5: mod_base = OTHER; note = 2'-O-methyl nucleotide
  modified_base 6: mod_base = OTHER; note = 2'Fluoro nucleotide
  modified_base 7: mod_base = OTHER; note = 2'-O-methyl nucleotide
  modified_base 8..9: mod_base = OTHER; note = 2'Fluoro nucleotide
  modified_base 10..13: mod_base = OTHER; note = 2'-O-methyl nucleotide
  modified_base 14: mod_base = OTHER; note = 2'Fluoro nucleotide
  modified_base 15: mod_base = OTHER; note = 2'-O-methyl nucleotide
  modified_base 16: mod_base = OTHER; note = 2'Fluoro nucleotide
  modified_base 17..23: mod_base = OTHER; note = 2'-O-methyl nucleotide
  modified_base 21..23: mod_base = OTHER; note = Phosphorothioate linkage
ttgctagctgcagccacaggcct

SEQ ID NO: 532 - RNA, 23 nt, synthetic construct
  source 1..23: mol_type = other RNA
  modified_base 1: mod_base = OTHER; note = 2'-O-methyl nucleotide
  modified_base 2: mod_base = OTHER; note = 2'Fluoro nucleotide
  modified_base 1..3: mod_base = OTHER; note = Phosphorothioate linkage
  modified_base 3..5: mod_base = OTHER; note = 2'-O-methyl nucleotide
  modified_base 6: mod_base = OTHER; note = 2'Fluoro nucleotide
  modified_base 7: mod_base = OTHER; note = 2'-O-methyl nucleotide
  modified_base 8..9: mod_base = OTHER; note = 2'Fluoro nucleotide
  modified_base 10..13: mod_base = OTHER; note = 2'-O-methyl nucleotide
  modified_base 14: mod_base = OTHER; note = 2'Fluoro nucleotide
  modified_base 15: mod_base = OTHER; note = 2'-O-methyl nucleotide
  modified_base 16: mod_base = OTHER; note = 2'Fluoro nucleotide
  modified_base 17..23: mod_base = OTHER; note = 2'-O-methyl nucleotide
  modified_base 21..23: mod_base = OTHER; note = Phosphorothioate linkage
cttgctagctgcagccacaggcc

SEQ ID NO: 533 - RNA, 23 nt, synthetic construct
  source 1..23: mol_type = other RNA
  modified_base 1: mod_base = OTHER; note = 2'-O-methyl nucleotide
  modified_base 2: mod_base = OTHER; note = 2'Fluoro nucleotide
  modified_base 1..3: mod_base = OTHER; note = Phosphorothioate linkage
  modified_base 3..5: mod_base = OTHER; note = 2'-O-methyl nucleotide
  modified_base 6: mod_base = OTHER; note = 2'Fluoro nucleotide
  modified_base 7: mod_base = OTHER; note = 2'-O-methyl nucleotide
  modified_base 8..9: mod_base = OTHER; note = 2'Fluoro nucleotide
  modified_base 10..13: mod_base = OTHER; note = 2'-O-methyl nucleotide
  modified_base 14: mod_base = OTHER; note = 2'Fluoro nucleotide
  modified_base 15: mod_base = OTHER; note = 2'-O-methyl nucleotide
  modified_base 16: mod_base = OTHER; note = 2'Fluoro nucleotide
  modified_base 17..23: mod_base = OTHER; note = 2'-O-methyl nucleotide
  modified_base 21..23: mod_base = OTHER; note = Phosphorothioate linkage
ttggtctcttcactccaaagccc

SEQ ID NO: 534 - RNA, 23 nt, synthetic construct
  source 1..23: mol_type = other RNA
  modified_base 1: mod_base = OTHER; note = 2'-O-methyl nucleotide
  modified_base 2: mod_base = OTHER; note = 2'Fluoro nucleotide
  modified_base 1..3: mod_base = OTHER; note = Phosphorothioate linkage
  modified_base 3..5: mod_base = OTHER; note = 2'-O-methyl nucleotide
  modified_base 6: mod_base = OTHER; note = 2'Fluoro nucleotide
  modified_base 7: mod_base = OTHER; note = 2'-O-methyl nucleotide
  modified_base 8..9: mod_base = OTHER; note = 2'Fluoro nucleotide
  modified_base 10..13: mod_base = OTHER; note = 2'-O-methyl nucleotide
  modified_base 14: mod_base = OTHER; note = 2'Fluoro nucleotide
  modified_base 15: mod_base = OTHER; note = 2'-O-methyl nucleotide
  modified_base 16: mod_base = OTHER; note = 2'Fluoro nucleotide
  modified_base 17..23: mod_base = OTHER; note = 2'-O-methyl nucleotide
  modified_base 21..23: mod_base = OTHER; note = Phosphorothioate linkage
agtcatattgccaggtggttgtt

SEQ ID NO: 535 - RNA, 23 nt, synthetic construct
  source 1..23: mol_type = other RNA
  modified_base 1: mod_base = OTHER; note = 2'-O-methyl nucleotide
  modified_base 2: mod_base = OTHER; note = 2'Fluoro nucleotide
  modified_base 1..3: mod_base = OTHER; note = Phosphorothioate linkage
  modified_base 3..5: mod_base = OTHER; note = 2'-O-methyl nucleotide
  modified_base 6: mod_base = OTHER; note = 2'Fluoro nucleotide
  modified_base 7: mod_base = OTHER; note = 2'-O-methyl nucleotide
  modified_base 8..9: mod_base = OTHER; note = 2'Fluoro nucleotide
  modified_base 10..13: mod_base = OTHER; note = 2'-O-methyl nucleotide
  modified_base 14: mod_base = OTHER; note = 2'Fluoro nucleotide
  modified_base 15: mod_base = OTHER; note = 2'-O-methyl nucleotide
  modified_base 16: mod_base = OTHER; note = 2'Fluoro nucleotide
  modified_base 17..23: mod_base = OTHER; note = 2'-O-methyl nucleotide
  modified_base 21..23: mod_base = OTHER; note = Phosphorothioate linkage
tgagtcatattgccaggtggttg

SEQ ID NO: 536 - RNA, 23 nt, synthetic construct
  source 1..23: mol_type = other RNA
  modified_base 1: mod_base = OTHER; note = 2'-O-methyl nucleotide
  modified_base 2: mod_base = OTHER; note = 2'Fluoro nucleotide
  modified_base 1..3: mod_base = OTHER; note = Phosphorothioate linkage
  modified_base 3..5: mod_base = OTHER; note = 2'-O-methyl nucleotide
  modified_base 6: mod_base = OTHER; note = 2'Fluoro nucleotide
  modified_base 7: mod_base = OTHER; note = 2'-O-methyl nucleotide
  modified_base 8..9: mod_base = OTHER; note = 2'Fluoro nucleotide
  modified_base 10..13: mod_base = OTHER; note = 2'-O-methyl nucleotide
  modified_base 14: mod_base = OTHER; note = 2'Fluoro nucleotide
  modified_base 15: mod_base = OTHER; note = 2'-O-methyl nucleotide
  modified_base 16: mod_base = OTHER; note = 2'Fluoro nucleotide
  modified_base 17..23: mod_base = OTHER; note = 2'-O-methyl nucleotide
  modified_base 21..23: mod_base = OTHER; note = Phosphorothioate linkage
agtgagtcatattgccaggtggt

SEQ ID NO: 537 - RNA, 23 nt, synthetic construct
  source 1..23: mol_type = other RNA
  modified_base 1: mod_base = OTHER; note = 2'-O-methyl nucleotide
  modified_base 2: mod_base = OTHER; note = 2'Fluoro nucleotide
  modified_base 1..3: mod_base = OTHER; note = Phosphorothioate linkage
  modified_base 3..5: mod_base = OTHER; note = 2'-O-methyl nucleotide
  modified_base 6: mod_base = OTHER; note = 2'Fluoro nucleotide
  modified_base 7: mod_base = OTHER; note = 2'-O-methyl nucleotide
  modified_base 8..9: mod_base = OTHER; note = 2'Fluoro nucleotide
  modified_base 10..13: mod_base = OTHER; note = 2'-O-methyl nucleotide
  modified_base 14: mod_base = OTHER; note = 2'Fluoro nucleotide
  modified_base 15: mod_base = OTHER; note = 2'-O-methyl nucleotide
  modified_base 16: mod_base = OTHER; note = 2'Fluoro nucleotide
  modified_base 17..23: mod_base = OTHER; note = 2'-O-methyl nucleotide
  modified_base 21..23: mod_base = OTHER; note = Phosphorothioate linkage
agaaagtgcccatttgggtccca

SEQ ID NO: 538 - RNA, 23 nt, synthetic construct
  source 1..23: mol_type = other RNA
  modified_base 1: mod_base = OTHER; note = 2'-O-methyl nucleotide
  modified_base 2: mod_base = OTHER; note = 2'Fluoro nucleotide
  modified_base 1..3: mod_base = OTHER; note = Phosphorothioate linkage
  modified_base 3..5: mod_base = OTHER; note = 2'-O-methyl nucleotide
  modified_base 6: mod_base = OTHER; note = 2'Fluoro nucleotide
  modified_base 7: mod_base = OTHER; note = 2'-O-methyl nucleotide
  modified_base 8..9: mod_base = OTHER; note = 2'Fluoro nucleotide
  modified_base 10..13: mod_base = OTHER; note = 2'-O-methyl nucleotide
  modified_base 14: mod_base = OTHER; note = 2'Fluoro nucleotide
  modified_base 15: mod_base = OTHER; note = 2'-O-methyl nucleotide
  modified_base 16: mod_base = OTHER; note = 2'Fluoro nucleotide
  modified_base 17..23: mod_base = OTHER; note = 2'-O-methyl nucleotide
  modified_base 21..23: mod_base = OTHER; note = Phosphorothioate linkage
acaagaaagtgcccatttgggtc

SEQ ID NO: 539 - RNA, 23 nt, synthetic construct
  source 1..23: mol_type = other RNA
  modified_base 1: mod_base = OTHER; note = 2'-O-methyl nucleotide
  modified_base 2: mod_base = OTHER; note = 2'Fluoro nucleotide
  modified_base 1..3: mod_base = OTHER; note = Phosphorothioate linkage
  modified_base 3..5: mod_base = OTHER; note = 2'-O-methyl nucleotide
  modified_base 6: mod_base = OTHER; note = 2'Fluoro nucleotide
  modified_base 7: mod_base = OTHER; note = 2'-O-methyl nucleotide
  modified_base 8..9: mod_base = OTHER; note = 2'Fluoro nucleotide
  modified_base 10..13: mod_base = OTHER; note = 2'-O-methyl nucleotide
  modified_base 14: mod_base = OTHER; note = 2'Fluoro nucleotide
  modified_base 15: mod_base = OTHER; note = 2'-O-methyl nucleotide
  modified_base 16: mod_base = OTHER; note = 2'Fluoro nucleotide
  modified_base 17..23: mod_base = OTHER; note = 2'-O-methyl nucleotide
  modified_base 21..23: mod_base = OTHER; note = Phosphorothioate linkage
agacaagaaagtgcccatttggg

SEQ ID NO: 540 - RNA, 23 nt, synthetic construct
  source 1..23: mol_type = other RNA
  modified_base 1: mod_base = OTHER; note = 2'-O-methyl nucleotide
  modified_base 2: mod_base = OTHER; note = 2'Fluoro nucleotide
  modified_base 1..3: mod_base = OTHER; note = Phosphorothioate linkage
  modified_base 3..5: mod_base = OTHER; note = 2'-O-methyl nucleotide
  modified_base 6: mod_base = OTHER; note = 2'Fluoro nucleotide
  modified_base 7: mod_base = OTHER; note = 2'-O-methyl nucleotide
  modified_base 8..9: mod_base = OTHER; note = 2'Fluoro nucleotide
  modified_base 10..13: mod_base = OTHER; note = 2'-O-methyl nucleotide
  modified_base 14: mod_base = OTHER; note = 2'Fluoro nucleotide
  modified_base 15: mod_base = OTHER; note = 2'-O-methyl nucleotide
  modified_base 16: mod_base = OTHER; note = 2'Fluoro nucleotide
  modified_base 17..23: mod_base = OTHER; note = 2'-O-methyl nucleotide
  modified_base 21..23: mod_base = OTHER; note = Phosphorothioate linkage
agtctcagacaagaaagtgccca

SEQ ID NO: 541 - RNA, 23 nt, synthetic construct
  source 1..23: mol_type = other RNA
  modified_base 1: mod_base = OTHER; note = 2'-O-methyl nucleotide
  modified_base 2: mod_base = OTHER; note = 2'Fluoro nucleotide
  modified_base 1..3: mod_base = OTHER; note = Phosphorothioate linkage
  modified_base 3..5: mod_base = OTHER; note = 2'-O-methyl nucleotide
  modified_base 6: mod_base = OTHER; note = 2'Fluoro nucleotide
  modified_base 7: mod_base = OTHER; note = 2'-O-methyl nucleotide
  modified_base 8..9: mod_base = OTHER; note = 2'Fluoro nucleotide
  modified_base 10..13: mod_base = OTHER; note = 2'-O-methyl nucleotide
  modified_base 14: mod_base = OTHER; note = 2'Fluoro nucleotide
  modified_base 15: mod_base = OTHER; note = 2'-O-methyl nucleotide
  modified_base 16: mod_base = OTHER; note = 2'Fluoro nucleotide
  modified_base 17..23: mod_base = OTHER; note = 2'-O-methyl nucleotide
  modified_base 21..23: mod_base = OTHER; note = Phosphorothioate linkage
agagtctcagacaagaaagtgcc

SEQ ID NO: 542 - RNA, 23 nt, synthetic construct
  source 1..23: mol_type = other RNA
  modified_base 1: mod_base = OTHER; note = 2'-O-methyl nucleotide
  modified_base 2: mod_base = OTHER; note = 2'Fluoro nucleotide
  modified_base 1..3: mod_base = OTHER; note = Phosphorothioate linkage
  modified_base 3..5: mod_base = OTHER; note = 2'-O-methyl nucleotide
  modified_base 6: mod_base = OTHER; note = 2'Fluoro nucleotide
  modified_base 7: mod_base = OTHER; note = 2'-O-methyl nucleotide
  modified_base 8..9: mod_base = OTHER; note = 2'Fluoro nucleotide
  modified_base 10..13: mod_base = OTHER; note = 2'-O-methyl nucleotide
  modified_base 14: mod_base = OTHER; note = 2'Fluoro nucleotide
  modified_base 15: mod_base = OTHER; note = 2'-O-methyl nucleotide
  modified_base 16: mod_base = OTHER; note = 2'Fluoro nucleotide
  modified_base 17..23: mod_base = OTHER; note = 2'-O-methyl nucleotide
  modified_base 21..23: mod_base = OTHER; note = Phosphorothioate linkage
taagccagagtctcagacaagaa

SEQ ID NO: 543 - RNA, 23 nt, synthetic construct
  source 1..23: mol_type = other RNA
  modified_base 1: mod_base = OTHER; note = 2'-O-methyl nucleotide
  modified_base 2: mod_base = OTHER; note = 2'Fluoro nucleotide
  modified_base 1..3: mod_base = OTHER; note = Phosphorothioate linkage
  modified_base 3..5: mod_base = OTHER; note = 2'-O-methyl nucleotide
  modified_base 6: mod_base = OTHER; note = 2'Fluoro nucleotide
  modified_base 7: mod_base = OTHER; note = 2'-O-methyl nucleotide
  modified_base 8..9: mod_base = OTHER; note = 2'Fluoro nucleotide
  modified_base 10..13: mod_base = OTHER; note = 2'-O-methyl nucleotide
  modified_base 14: mod_base = OTHER; note = 2'Fluoro nucleotide
  modified_base 15: mod_base = OTHER; note = 2'-O-methyl nucleotide
  modified_base 16: mod_base = OTHER; note = 2'Fluoro nucleotide
  modified_base 17..23: mod_base = OTHER; note = 2'-O-methyl nucleotide
  modified_base 21..23: mod_base = OTHER; note = Phosphorothioate linkage
taatttttctctgccttccctcc

SEQ ID NO: 544 - RNA, 23 nt, synthetic construct
  source 1..23: mol_type = other RNA
  modified_base 1: mod_base = OTHER; note = 2'-O-methyl nucleotide
  modified_base 2: mod_base = OTHER; note = 2'Fluoro nucleotide
  modified_base 1..3: mod_base = OTHER; note = Phosphorothioate linkage
  modified_base 3..5: mod_base = OTHER; note = 2'-O-methyl nucleotide
  modified_base 6: mod_base = OTHER; note = 2'Fluoro nucleotide
  modified_base 7: mod_base = OTHER; note = 2'-O-methyl nucleotide
  modified_base 8..9: mod_base = OTHER; note = 2'Fluoro nucleotide
  modified_base 10..13: mod_base = OTHER; note = 2'-O-methyl nucleotide
  modified_base 14: mod_base = OTHER; note = 2'Fluoro nucleotide
  modified_base 15: mod_base = OTHER; note = 2'-O-methyl nucleotide
  modified_base 16: mod_base = OTHER; note = 2'Fluoro nucleotide
  modified_base 17..23: mod_base = OTHER; note = 2'-O-methyl nucleotide
  modified_base 21..23: mod_base = OTHER; note = Phosphorothioate linkage
gtaatttttctctgccttccctc

SEQ ID NO: 545 - RNA, 23 nt, synthetic construct
  source 1..23: mol_type = other RNA
  modified_base 1: mod_base = OTHER; note = 2'-O-methyl nucleotide
  modified_base 2: mod_base = OTHER; note = 2'Fluoro nucleotide
  modified_base 1..3: mod_base = OTHER; note = Phosphorothioate linkage
  modified_base 3..5: mod_base = OTHER; note = 2'-O-methyl nucleotide
  modified_base 6: mod_base = OTHER; note = 2'Fluoro nucleotide
  modified_base 7: mod_base = OTHER; note = 2'-O-methyl nucleotide
  modified_base 8..9: mod_base = OTHER; note = 2'Fluoro nucleotide
  modified_base 10..13: mod_base = OTHER; note = 2'-O-methyl nucleotide
  modified_base 14: mod_base = OTHER; note = 2'Fluoro nucleotide
  modified_base 15: mod_base = OTHER; note = 2'-O-methyl nucleotide
  modified_base 16: mod_base = OTHER; note = 2'Fluoro nucleotide
  modified_base 17..23: mod_base = OTHER; note = 2'-O-methyl nucleotide
  modified_base 21..23: mod_base = OTHER; note = Phosphorothioate linkage
tttctcatcttgggagaggctaa

SEQ ID NO: 546 - RNA, 23 nt, synthetic construct
  source 1..23: mol_type = other RNA
  modified_base 1: mod_base = OTHER; note = 2'-O-methyl nucleotide
  modified_base 2: mod_base = OTHER; note = 2'Fluoro nucleotide
  modified_base 1..3: mod_base = OTHER; note = Phosphorothioate linkage
  modified_base 3..5: mod_base = OTHER; note = 2'-O-methyl nucleotide
  modified_base 6: mod_base = OTHER; note = 2'Fluoro nucleotide
  modified_base 7: mod_base = OTHER; note = 2'-O-methyl nucleotide
  modified_base 8..9: mod_base = OTHER; note = 2'Fluoro nucleotide
  modified_base 10..13: mod_base = OTHER; note = 2'-O-methyl nucleotide
  modified_base 14: mod_base = OTHER; note = 2'Fluoro nucleotide
  modified_base 15: mod_base = OTHER; note = 2'-O-methyl nucleotide
  modified_base 16: mod_base = OTHER; note = 2'Fluoro nucleotide
  modified_base 17..23: mod_base = OTHER; note = 2'-O-methyl nucleotide
  modified_base 21..23: mod_base = OTHER; note = Phosphorothioate linkage
actttctcatcttgggagaggct

SEQ ID NO: 547 - RNA, 23 nt, synthetic construct
  source 1..23: mol_type = other RNA
  modified_base 1: mod_base = OTHER; note = 2'-O-methyl nucleotide
  modified_base 2: mod_base = OTHER; note = 2'Fluoro nucleotide
  modified_base 1..3: mod_base = OTHER; note = Phosphorothioate linkage
  modified_base 3..5: mod_base = OTHER; note = 2'-O-methyl nucleotide
  modified_base 6: mod_base = OTHER; note = 2'Fluoro nucleotide
  modified_base 7: mod_base = OTHER; note = 2'-O-methyl nucleotide
  modified_base 8..9: mod_base = OTHER; note = 2'Fluoro nucleotide
  modified_base 10..13: mod_base = OTHER; note = 2'-O-methyl nucleotide
  modified_base 14: mod_base = OTHER; note = 2'Fluoro nucleotide
  modified_base 15: mod_base = OTHER; note = 2'-O-methyl nucleotide
  modified_base 16: mod_base = OTHER; note = 2'Fluoro nucleotide
  modified_base 17..23: mod_base = OTHER; note = 2'-O-methyl nucleotide
  modified_base 21..23: mod_base = OTHER; note = Phosphorothioate linkage
aggactttctcatcttgggagag

SEQ ID NO: 548 - RNA, 23 nt, synthetic construct
  source 1..23: mol_type = other RNA
  modified_base 1: mod_base = OTHER; note = 2'-O-methyl nucleotide
  modified_base 2: mod_base = OTHER; note = 2'Fluoro nucleotide
  modified_base 1..3: mod_base = OTHER; note = Phosphorothioate linkage
  modified_base 3..5: mod_base = OTHER; note = 2'-O-methyl nucleotide
  modified_base 6: mod_base = OTHER; note = 2'Fluoro nucleotide
  modified_base 7: mod_base = OTHER; note = 2'-O-methyl nucleotide
  modified_base 8..9: mod_base = OTHER; note = 2'Fluoro nucleotide
  modified_base 10..13: mod_base = OTHER; note = 2'-O-methyl nucleotide
  modified_base 14: mod_base = OTHER; note = 2'Fluoro nucleotide
  modified_base 15: mod_base = OTHER; note = 2'-O-methyl nucleotide
  modified_base 16: mod_base = OTHER; note = 2'Fluoro nucleotide
  modified_base 17..23: mod_base = OTHER; note = 2'-O-methyl nucleotide
  modified_base 21..23: mod_base = OTHER; note = Phosphorothioate linkage
tctatctgcttcctcctcccctc

SEQ ID NO: 549 - RNA, 23 nt, synthetic construct
  source 1..23: mol_type = other RNA
  modified_base 1: mod_base = OTHER; note = 2'-O-methyl nucleotide
  modified_base 2: mod_base = OTHER; note = 2'Fluoro nucleotide
  modified_base 1..3: mod_base = OTHER; note = Phosphorothioate linkage
  modified_base 3..5: mod_base = OTHER; note = 2'-O-methyl nucleotide
  modified_base 6: mod_base = OTHER; note = 2'Fluoro nucleotide
  modified_base 7: mod_base = OTHER; note = 2'-O-methyl nucleotide
  modified_base 8..9: mod_base = OTHER; note = 2'Fluoro nucleotide
  modified_base 10..13: mod_base = OTHER; note = 2'-O-methyl nucleotide
  modified_base 14: mod_base = OTHER; note = 2'Fluoro nucleotide
  modified_base 15: mod_base = OTHER; note = 2'-O-methyl nucleotide
  modified_base 16: mod_base = OTHER; note = 2'Fluoro nucleotide
  modified_base 17..23: mod_base = OTHER; note = 2'-O-methyl nucleotide
  modified_base 21..23: mod_base = OTHER; note = Phosphorothioate linkage
atctatctgcttcctcctcccct

SEQ ID NO: 550 - RNA, 23 nt, synthetic construct
  source 1..23: mol_type = other RNA
  modified_base 1: mod_base = OTHER; note = 2'-O-methyl nucleotide
  modified_base 2: mod_base = OTHER; note = 2'Fluoro nucleotide
  modified_base 1..3: mod_base = OTHER; note = Phosphorothioate linkage
  modified_base 3..5: mod_base = OTHER; note = 2'-O-methyl nucleotide
  modified_base 6: mod_base = OTHER; note = 2'Fluoro nucleotide
  modified_base 7: mod_base = OTHER; note = 2'-O-methyl nucleotide
  modified_base 8..9: mod_base = OTHER; note = 2'Fluoro nucleotide
  modified_base 10..13: mod_base = OTHER; note = 2'-O-methyl nucleotide
  modified_base 14: mod_base = OTHER; note = 2'Fluoro nucleotide
  modified_base 15: mod_base = OTHER; note = 2'-O-methyl nucleotide
  modified_base 16: mod_base = OTHER; note = 2'Fluoro nucleotide
  modified_base 17..23: mod_base = OTHER; note = 2'-O-methyl nucleotide
  modified_base 21..23: mod_base = OTHER; note = Phosphorothioate linkage
ttttcctgactcctgtttctggg

SEQ ID NO: 551 - RNA, 23 nt, synthetic construct
  source 1..23: mol_type = other RNA
  modified_base 1: mod_base = OTHER; note = 2'-O-methyl nucleotide
  modified_base 2: mod_base = OTHER; note = 2'Fluoro nucleotide
  modified_base 1..3: mod_base = OTHER; note = Phosphorothioate linkage
  modified_base 3..5: mod_base = OTHER; note = 2'-O-methyl nucleotide
  modified_base 6: mod_base = OTHER; note = 2'Fluoro nucleotide
  modified_base 7: mod_base = OTHER; note = 2'-O-methyl nucleotide
  modified_base 8..9: mod_base = OTHER; note = 2'Fluoro nucleotide
  modified_base 10..13: mod_base = OTHER; note = 2'-O-methyl nucleotide
  modified_base 14: mod_base = OTHER; note = 2'Fluoro nucleotide
  modified_base 15: mod_base = OTHER; note = 2'-O-methyl nucleotide
  modified_base 16: mod_base = OTHER; note = 2'Fluoro nucleotide
  modified_base 17..23: mod_base = OTHER; note = 2'-O-methyl nucleotide
  modified_base 21..23: mod_base = OTHER; note = Phosphorothioate linkage
ggaacttcttaggcttagtgcct

SEQ ID NO: 552 - RNA, 23 nt, synthetic construct
  source 1..23: mol_type = other RNA
  modified_base 1: mod_base = OTHER; note = 2'-O-methyl nucleotide
  modified_base 2: mod_base = OTHER; note = 2'Fluoro nucleotide
  modified_base 1..3: mod_base = OTHER; note = Phosphorothioate linkage
  modified_base 3..5: mod_base = OTHER; note = 2'-O-methyl nucleotide
  modified_base 6: mod_base = OTHER; note = 2'Fluoro nucleotide
  modified_base 7: mod_base = OTHER; note = 2'-O-methyl nucleotide
  modified_base 8..9: mod_base = OTHER; note = 2'Fluoro nucleotide
  modified_base 10..13: mod_base = OTHER; note = 2'-O-methyl nucleotide
  modified_base 14: mod_base = OTHER; note = 2'Fluoro nucleotide
  modified_base 15: mod_base = OTHER; note = 2'-O-methyl nucleotide
  modified_base 16: mod_base = OTHER; note = 2'Fluoro nucleotide
  modified_base 17..23: mod_base = OTHER; note = 2'-O-methyl nucleotide
  modified_base 21..23: mod_base = OTHER; note = Phosphorothioate linkage
aaatgcttgtctcccagtgggtc

SEQ ID NO: 553 - RNA, 23 nt, synthetic construct
  source 1..23: mol_type = other RNA
  modified_base 1: mod_base = OTHER; note = 2'-O-methyl nucleotide
  modified_base 2: mod_base = OTHER; note = 2'Fluoro nucleotide
  modified_base 1..3: mod_base = OTHER; note = Phosphorothioate linkage
  modified_base 3..5: mod_base = OTHER; note = 2'-O-methyl nucleotide
  modified_base 6: mod_base = OTHER; note = 2'Fluoro nucleotide
  modified_base 7: mod_base = OTHER; note = 2'-O-methyl nucleotide
  modified_base 8..9: mod_base = OTHER; note = 2'Fluoro nucleotide
  modified_base 10..13: mod_base = OTHER; note = 2'-O-methyl nucleotide
  modified_base 14: mod_base = OTHER; note = 2'Fluoro nucleotide
  modified_base 15: mod_base = OTHER; note = 2'-O-methyl nucleotide
  modified_base 16: mod_base = OTHER; note = 2'Fluoro nucleotide
  modified_base 17..23: mod_base = OTHER; note = 2'-O-methyl nucleotide
  modified_base 21..23: mod_base = OTHER; note = Phosphorothioate linkage
taaatgcttgtctcccagtgggt

SEQ ID NO: 554 - RNA, 23 nt, synthetic construct
  source 1..23: mol_type = other RNA
  modified_base 1: mod_base = OTHER; note = 2'-O-methyl nucleotide
  modified_base 2: mod_base = OTHER; note = 2'Fluoro nucleotide
  modified_base 1..3: mod_base = OTHER; note = Phosphorothioate linkage
  modified_base 3..5: mod_base = OTHER; note = 2'-O-methyl nucleotide
  modified_base 6: mod_base = OTHER; note = 2'Fluoro nucleotide
  modified_base 7: mod_base = OTHER; note = 2'-O-methyl nucleotide
  modified_base 8..9: mod_base = OTHER; note = 2'Fluoro nucleotide
  modified_base 10..13: mod_base = OTHER; note = 2'-O-methyl nucleotide
  modified_base 14: mod_base = OTHER; note = 2'Fluoro nucleotide
  modified_base 15: mod_base = OTHER; note = 2'-O-methyl nucleotide
  modified_base 16: mod_base = OTHER; note = 2'Fluoro nucleotide
  modified_base 17..23: mod_base = OTHER; note = 2'-O-methyl nucleotide
  modified_base 21..23: mod_base = OTHER; note = Phosphorothioate linkage
tataaatgcttgtctcccagtgg

SEQ ID NO: 555 - RNA, 23 nt, synthetic construct
  source 1..23: mol_type = other RNA
  modified_base 1: mod_base = OTHER; note = 2'-O-methyl nucleotide
  modified_base 2: mod_base = OTHER; note = 2'Fluoro nucleotide
  modified_base 1..3: mod_base = OTHER; note = Phosphorothioate linkage
  modified_base 3..5: mod_base = OTHER; note = 2'-O-methyl nucleotide
  modified_base 6: mod_base = OTHER; note = 2'Fluoro nucleotide
  modified_base 7: mod_base = OTHER; note = 2'-O-methyl nucleotide
  modified_base 8..9: mod_base = OTHER; note = 2'Fluoro nucleotide
  modified_base 10..13: mod_base = OTHER; note = 2'-O-methyl nucleotide
  modified_base 14: mod_base = OTHER; note = 2'Fluoro nucleotide
  modified_base 15: mod_base = OTHER; note = 2'-O-methyl nucleotide
  modified_base 16: mod_base = OTHER; note = 2'Fluoro nucleotide
  modified_base 17..23: mod_base = OTHER; note = 2'-O-methyl nucleotide
  modified_base 21..23: mod_base = OTHER; note = Phosphorothioate linkage
agtataaatgcttgtctcccagt

SEQ ID NO: 556 - RNA, 23 nt, synthetic construct
  source 1..23: mol_type = other RNA
  modified_base 1: mod_base = OTHER; note = 2'-O-methyl nucleotide
  modified_base 2: mod_base = OTHER; note = 2'Fluoro nucleotide
  modified_base 1..3: mod_base = OTHER; note = Phosphorothioate linkage
  modified_base 3..5: mod_base = OTHER; note = 2'-O-methyl nucleotide
  modified_base 6: mod_base = OTHER; note = 2'Fluoro nucleotide
  modified_base 7: mod_base = OTHER; note = 2'-O-methyl nucleotide
  modified_base 8..9: mod_base = OTHER; note = 2'Fluoro nucleotide
  modified_base 10..13: mod_base = OTHER; note = 2'-O-methyl nucleotide
  modified_base 14: mod_base = OTHER; note = 2'Fluoro nucleotide
  modified_base 15: mod_base = OTHER; note = 2'-O-methyl nucleotide
  modified_base 16: mod_base = OTHER; note = 2'Fluoro nucleotide
  modified_base 17..23: mod_base = OTHER; note = 2'-O-methyl nucleotide
  modified_base 21..23: mod_base = OTHER; note = Phosphorothioate linkage
aagtataaatgcttgtctcccag

SEQ ID NO: 557 - RNA, 23 nt, synthetic construct
  source 1..23: mol_type = other RNA
  modified_base 1: mod_base = OTHER; note = 2'-O-methyl nucleotide
  modified_base 2: mod_base = OTHER; note = 2'Fluoro nucleotide
  modified_base 1..3: mod_base = OTHER; note = Phosphorothioate linkage
  modified_base 3..5: mod_base = OTHER; note = 2'-O-methyl nucleotide
  modified_base 6: mod_base = OTHER; note = 2'Fluoro nucleotide
  modified_base 7: mod_base = OTHER; note = 2'-O-methyl nucleotide
  modified_base 8..9: mod_base = OTHER; note = 2'Fluoro nucleotide
  modified_base 10..13: mod_base = OTHER; note = 2'-O-methyl nucleotide
  modified_base 14: mod_base = OTHER; note = 2'Fluoro nucleotide
  modified_base 15: mod_base = OTHER; note = 2'-O-methyl nucleotide
  modified_base 16: mod_base = OTHER; note = 2'Fluoro nucleotide
  modified_base 17..23: mod_base = OTHER; note = 2'-O-methyl nucleotide
  modified_base 21..23: mod_base = OTHER; note = Phosphorothioate linkage
aagaaagtataaatgcttgtctc

SEQ ID NO: 558 - RNA, 23 nt, synthetic construct
  source 1..23: mol_type = other RNA
  modified_base 1: mod_base = OTHER; note = 2'-O-methyl nucleotide
  modified_base 2: mod_base = OTHER; note = 2'Fluoro nucleotide
  modified_base 1..3: mod_base = OTHER; note = Phosphorothioate linkage
  modified_base 3..5: mod_base = OTHER; note = 2'-O-methyl nucleotide
  modified_base 6: mod_base = OTHER; note = 2'Fluoro nucleotide
  modified_base 7: mod_base = OTHER; note = 2'-O-methyl nucleotide
  modified_base 8..9: mod_base = OTHER; note = 2'Fluoro nucleotide
  modified_base 10..13: mod_base = OTHER; note = 2'-O-methyl nucleotide
  modified_base 14: mod_base = OTHER; note = 2'Fluoro nucleotide
  modified_base 15: mod_base = OTHER; note = 2'-O-methyl nucleotide
  modified_base 16: mod_base = OTHER; note = 2'Fluoro nucleotide
  modified_base 17..23: mod_base = OTHER; note = 2'-O-methyl nucleotide
  modified_base 21..23: mod_base = OTHER; note = Phosphorothioate linkage
ataagccaggcgcggtggctcac

SEQ ID NO: 559 - RNA, 23 nt, synthetic construct
  source 1..23: mol_type = other RNA
  modified_base 1: mod_base = OTHER; note = 2'-O-methyl nucleotide
  modified_base 2: mod_base = OTHER; note = 2'Fluoro nucleotide
  modified_base 1..3: mod_base = OTHER; note = Phosphorothioate linkage
  modified_base 3..5: mod_base = OTHER; note = 2'-O-methyl nucleotide
  modified_base 6: mod_base = OTHER; note = 2'Fluoro nucleotide
  modified_base 7: mod_base = OTHER; note = 2'-O-methyl nucleotide
  modified_base 8..9: mod_base = OTHER; note = 2'Fluoro nucleotide
  modified_base 10..13: mod_base = OTHER; note = 2'-O-methyl nucleotide
  modified_base 14: mod_base = OTHER; note = 2'Fluoro nucleotide
  modified_base 15: mod_base = OTHER; note = 2'-O-methyl nucleotide
  modified_base 16: mod_base = OTHER; note = 2'Fluoro nucleotide
  modified_base 17..23: mod_base = OTHER; note = 2'-O-methyl nucleotide
  modified_base 21..23: mod_base = OTHER; note = Phosphorothioate linkage
agtataagccaggcgcggtggct

SEQ ID NO: 560 - RNA, 23 nt, synthetic construct
  source 1..23: mol_type = other RNA
  modified_base 1: mod_base = OTHER; note = 2'-O-methyl nucleotide
  modified_base 2: mod_base = OTHER; note = 2'Fluoro nucleotide
  modified_base 1..3: mod_base = OTHER; note = Phosphorothioate linkage
  modified_base 3..5: mod_base = OTHER; note = 2'-O-methyl nucleotide
  modified_base 6: mod_base = OTHER; note = 2'Fluoro nucleotide
  modified_base 7: mod_base = OTHER; note = 2'-O-methyl nucleotide
  modified_base 8..9: mod_base = OTHER; note = 2'Fluoro nucleotide
  modified_base 10..13: mod_base = OTHER; note = 2'-O-methyl nucleotide
  modified_base 14: mod_base = OTHER; note = 2'Fluoro nucleotide
  modified_base 15: mod_base = OTHER; note = 2'-O-methyl nucleotide
  modified_base 16: mod_base = OTHER; note = 2'Fluoro nucleotide
  modified_base 17..23: mod_base = OTHER; note = 2'-O-methyl nucleotide
  modified_base 21..23: mod_base = OTHER; note = Phosphorothioate linkage
aaagtataagccaggcgcggtgg

SEQ ID NO: 561 - RNA, 23 nt, synthetic construct
  source 1..23: mol_type = other RNA
  modified_base 1: mod_base = OTHER; note = 2'-O-methyl nucleotide
  modified_base 2: mod_base = OTHER; note = 2'Fluoro nucleotide
  modified_base 1..3: mod_base = OTHER; note = Phosphorothioate linkage
  modified_base 3..5: mod_base = OTHER; note = 2'-O-methyl nucleotide
  modified_base 6: mod_base = OTHER; note = 2'Fluoro nucleotide
  modified_base 7: mod_base = OTHER; note = 2'-O-methyl nucleotide
  modified_base 8..9: mod_base = OTHER; note = 2'Fluoro nucleotide
  modified_base 10..13: mod_base = OTHER; note = 2'-O-methyl nucleotide
  modified_base 14: mod_base = OTHER; note = 2'Fluoro nucleotide
  modified_base 15: mod_base = OTHER; note = 2'-O-methyl nucleotide
  modified_base 16: mod_base = OTHER; note = 2'Fluoro nucleotide
  modified_base 17..23: mod_base = OTHER; note = 2'-O-methyl nucleotide
  modified_base 21..23: mod_base = OTHER; note = Phosphorothioate linkage
agaaagtataagccaggcgcggt

SEQ ID NO: 562 - RNA, 23 nt, synthetic construct
  source 1..23: mol_type = other RNA
  modified_base 1: mod_base = OTHER; note = 2'-O-methyl nucleotide
  modified_base 2: mod_base = OTHER; note = 2'Fluoro nucleotide
  modified_base 1..3: mod_base = OTHER; note = Phosphorothioate linkage
  modified_base 3..5: mod_base = OTHER; note = 2'-O-methyl nucleotide
  modified_base 6: mod_base = OTHER; note = 2'Fluoro nucleotide
  modified_base 7: mod_base = OTHER; note = 2'-O-methyl nucleotide
  modified_base 8..9: mod_base = OTHER; note = 2'Fluoro nucleotide
  modified_base 10..13: mod_base = OTHER; note = 2'-O-methyl nucleotide
  modified_base 14: mod_base = OTHER; note = 2'Fluoro nucleotide
  modified_base 15: mod_base = OTHER; note = 2'-O-methyl nucleotide
  modified_base 16: mod_base = OTHER; note = 2'Fluoro nucleotide
  modified_base 17..23: mod_base = OTHER; note = 2'-O-methyl nucleotide
  modified_base 21..23: mod_base = OTHER; note = Phosphorothioate linkage
aagaaagtataagccaggcgcgg

SEQ ID NO: 563 - RNA, 23 nt, synthetic construct
  source 1..23: mol_type = other RNA
  modified_base 1: mod_base = OTHER; note = 2'-O-methyl nucleotide
  modified_base 2: mod_base = OTHER; note = 2'Fluoro nucleotide
  modified_base 1..3: mod_base = OTHER; note = Phosphorothioate linkage
  modified_base 3..5: mod_base = OTHER; note = 2'-O-methyl nucleotide
  modified_base 6: mod_base = OTHER; note = 2'Fluoro nucleotide
  modified_base 7: mod_base = OTHER; note = 2'-O-methyl nucleotide
  modified_base 8..9: mod_base = OTHER; note = 2'Fluoro nucleotide
  modified_base 10..13: mod_base = OTHER; note = 2'-O-methyl nucleotide
  modified_base 14: mod_base = OTHER; note = 2'Fluoro nucleotide
  modified_base 15: mod_base = OTHER; note = 2'-O-methyl nucleotide
  modified_base 16: mod_base = OTHER; note = 2'Fluoro nucleotide
  modified_base 17..23: mod_base = OTHER; note = 2'-O-methyl nucleotide
  modified_base 21..23: mod_base = OTHER; note = Phosphorothioate linkage
taagaaagtataagccaggcgcg

SEQ ID NO: 564 - RNA, 23 nt, synthetic construct
  source 1..23: mol_type = other RNA
  modified_base 1: mod_base = OTHER; note = 2'-O-methyl nucleotide
  modified_base 2: mod_base = OTHER; note = 2'Fluoro nucleotide
  modified_base 1..3: mod_base = OTHER; note = Phosphorothioate linkage
  modified_base 3..5: mod_base = OTHER; note = 2'-O-methyl nucleotide
  modified_base 6: mod_base = OTHER; note = 2'Fluoro nucleotide
  modified_base 7: mod_base = OTHER; note = 2'-O-methyl nucleotide
  modified_base 8..9: mod_base = OTHER; note = 2'Fluoro nucleotide
  modified_base 10..13: mod_base = OTHER; note = 2'-O-methyl nucleotide
  modified_base 14: mod_base = OTHER; note = 2'Fluoro nucleotide
  modified_base 15: mod_base = OTHER; note = 2'-O-methyl nucleotide
  modified_base 16: mod_base = OTHER; note = 2'Fluoro nucleotide
  modified_base 17..23: mod_base = OTHER; note = 2'-O-methyl nucleotide
  modified_base 21..23: mod_base = OTHER; note = Phosphorothioate linkage
ttaagaaagtataagccaggcgc

SEQ ID NO: 565 - RNA, 23 nt, synthetic construct
  source 1..23: mol_type = other RNA
  modified_base 1: mod_base = OTHER; note = 2'-O-methyl nucleotide
  modified_base 2: mod_base = OTHER; note = 2'Fluoro nucleotide
  modified_base 1..3: mod_base = OTHER; note = Phosphorothioate linkage
  modified_base 3..5: mod_base = OTHER; note = 2'-O-methyl nucleotide
  modified_base 6: mod_base = OTHER; note = 2'Fluoro nucleotide
  modified_base 7: mod_base = OTHER; note = 2'-O-methyl nucleotide
  modified_base 8..9: mod_base = OTHER; note = 2'Fluoro nucleotide
  modified_base 10..13: mod_base = OTHER; note = 2'-O-methyl nucleotide
  modified_base 14: mod_base = OTHER; note = 2'Fluoro nucleotide
  modified_base 15: mod_base = OTHER; note = 2'-O-methyl nucleotide
  modified_base 16: mod_base = OTHER; note = 2'Fluoro nucleotide
  modified_base 17..23: mod_base = OTHER; note = 2'-O-methyl nucleotide
  modified_base 21..23: mod_base = OTHER; note = Phosphorothioate linkage
attaagaaagtataagccaggcg

SEQ ID NO: 566 - RNA, 23 nt, synthetic construct
  source 1..23: mol_type = other RNA
  modified_base 1: mod_base = OTHER; note = 2'-O-methyl nucleotide
  modified_base 2: mod_base = OTHER; note = 2'Fluoro nucleotide
  modified_base 1..3: mod_base = OTHER; note = Phosphorothioate linkage
  modified_base 3..5: mod_base = OTHER; note = 2'-O-methyl nucleotide
  modified_base 6: mod_base = OTHER; note = 2'Fluoro nucleotide
  modified_base 7: mod_base = OTHER; note = 2'-O-methyl nucleotide
  modified_base 8..9: mod_base = OTHER; note = 2'Fluoro nucleotide
  modified_base 10..13: mod_base = OTHER; note = 2'-O-methyl nucleotide
  modified_base 14: mod_base = OTHER; note = 2'Fluoro nucleotide
  modified_base 15: mod_base = OTHER; note = 2'-O-methyl nucleotide
  modified_base 16: mod_base = OTHER; note = 2'Fluoro nucleotide
  modified_base 17..23: mod_base = OTHER; note = 2'-O-methyl nucleotide
  modified_base 21..23: mod_base = OTHER; note = Phosphorothioate linkage
ttattaagaaagtataagccagg

SEQ ID NO: 567 - RNA, 23 nt, synthetic construct
  source 1..23: mol_type = other RNA
  modified_base 1: mod_base = OTHER; note = 2'-O-methyl nucleotide
  modified_base 2: mod_base = OTHER; note = 2'Fluoro nucleotide
  modified_base 1..3: mod_base = OTHER; note = Phosphorothioate linkage
  modified_base 3..5: mod_base = OTHER; note = 2'-O-methyl nucleotide
  modified_base 6: mod_base = OTHER; note = 2'Fluoro nucleotide
  modified_base 7: mod_base = OTHER; note = 2'-O-methyl nucleotide
  modified_base 8..9: mod_base = OTHER; note = 2'Fluoro nucleotide
  modified_base 10..13: mod_base = OTHER; note = 2'-O-methyl nucleotide
  modified_base 14: mod_base = OTHER; note = 2'Fluoro nucleotide
  modified_base 15: mod_base = OTHER; note = 2'-O-methyl nucleotide
  modified_base 16: mod_base = OTHER; note = 2'Fluoro nucleotide
  modified_base 17..23: mod_base = OTHER; note = 2'-O-methyl nucleotide
  modified_base 21..23: mod_base = OTHER; note = Phosphorothioate linkage
tttattaagaaagtataagccag

SEQ ID NO: 568 - RNA, 23 nt, synthetic construct
  source 1..23: mol_type = other RNA
  modified_base 1: mod_base = OTHER; note = 2'-O-methyl nucleotide
  modified_base 2: mod_base = OTHER; note = 2'Fluoro nucleotide
  modified_base 1..3: mod_base = OTHER; note = Phosphorothioate linkage
  modified_base 3..5: mod_base = OTHER; note = 2'-O-methyl nucleotide
  modified_base 6: mod_base = OTHER; note = 2'Fluoro nucleotide
  modified_base 7: mod_base = OTHER; note = 2'-O-methyl nucleotide
  modified_base 8..9: mod_base = OTHER; note = 2'Fluoro nucleotide
  modified_base 10..13: mod_base = OTHER; note = 2'-O-methyl nucleotide
  modified_base 14: mod_base = OTHER; note = 2'Fluoro nucleotide
  modified_base 15: mod_base = OTHER; note = 2'-O-methyl nucleotide
  modified_base 16: mod_base = OTHER; note = 2'Fluoro nucleotide
  modified_base 17..23: mod_base = OTHER; note = 2'-O-methyl nucleotide
  modified_base 21..23: mod_base = OTHER; note = Phosphorothioate linkage
tttttattaagaaagtataagcc

SEQ ID NO: 569 - RNA, 23 nt, synthetic construct
  source 1..23: mol_type = other RNA
  modified_base 1: mod_base = OTHER; note = 2'-O-methyl nucleotide
  modified_base 2: mod_base = OTHER; note = 2'Fluoro nucleotide
  modified_base 1..3: mod_base = OTHER; note = Phosphorothioate linkage
  modified_base 3..5: mod_base = OTHER; note = 2'-O-methyl nucleotide
  modified_base 6: mod_base = OTHER; note = 2'Fluoro nucleotide
  modified_base 7: mod_base = OTHER; note = 2'-O-methyl nucleotide
  modified_base 8..9: mod_base = OTHER; note = 2'Fluoro nucleotide
  modified_base 10..13: mod_base = OTHER; note = 2'-O-methyl nucleotide
  modified_base 14: mod_base = OTHER; note = 2'Fluoro nucleotide
  modified_base 15: mod_base = OTHER; note = 2'-O-methyl nucleotide
  modified_base 16: mod_base = OTHER; note = 2'Fluoro nucleotide
  modified_base 17..23: mod_base = OTHER; note = 2'-O-methyl nucleotide
  modified_base 21..23: mod_base = OTHER; note = Phosphorothioate linkage
tttgactttgtggacacccctga

SEQ ID NO: 570 - RNA, 23 nt, synthetic construct
  source 1..23: mol_type = other RNA
  modified_base 1: mod_base = OTHER; note = 2'-O-methyl nucleotide
  modified_base 2: mod_base = OTHER; note = 2'Fluoro nucleotide
  modified_base 1..3: mod_base = OTHER; note = Phosphorothioate linkage
  modified_base 3..5: mod_base = OTHER; note = 2'-O-methyl nucleotide
  modified_base 6: mod_base = OTHER; note = 2'Fluoro nucleotide
  modified_base 7: mod_base = OTHER; note = 2'-O-methyl nucleotide
  modified_base 8..9: mod_base = OTHER; note = 2'Fluoro nucleotide
  modified_base 10..13: mod_base = OTHER; note = 2'-O-methyl nucleotide
  modified_base 14: mod_base = OTHER; note = 2'Fluoro nucleotide
  modified_base 15: mod_base = OTHER; note = 2'-O-methyl nucleotide
  modified_base 16: mod_base = OTHER; note = 2'Fluoro nucleotide
  modified_base 17..23: mod_base = OTHER; note = 2'-O-methyl nucleotide
  modified_base 21..23: mod_base = OTHER; note = Phosphorothioate linkage
ctttgactttgtggacacccctg

SEQ ID NO: 571 - RNA, 23 nt, synthetic construct
  source 1..23: mol_type = other RNA
  modified_base 1: mod_base = OTHER; note = 2'-O-methyl nucleotide
  modified_base 2: mod_base = OTHER; note = 2'Fluoro nucleotide
  modified_base 1..3: mod_base = OTHER; note = Phosphorothioate linkage
  modified_base 3..5: mod_base = OTHER; note = 2'-O-methyl nucleotide
  modified_base 6: mod_base = OTHER; note = 2'Fluoro nucleotide
  modified_base 7: mod_base = OTHER; note = 2'-O-methyl nucleotide
  modified_base 8..9: mod_base = OTHER; note = 2'Fluoro nucleotide
  modified_base 10..13: mod_base = OTHER; note = 2'-O-methyl nucleotide
  modified_base 14: mod_base = OTHER; note = 2'Fluoro nucleotide
  modified_base 15: mod_base = OTHER; note = 2'-O-methyl nucleotide
  modified_base 16: mod_base = OTHER; note = 2'Fluoro nucleotide
  modified_base 17..23: mod_base = OTHER; note = 2'-O-methyl nucleotide
  modified_base 21..23: mod_base = OTHER; note = Phosphorothioate linkage
aacatgttagtattattatgaaa

SEQ ID NO: 572 - RNA, 23 nt, synthetic construct
  source 1..23: mol_type = other RNA
  modified_base 1: mod_base = OTHER; note = 2'-O-methyl nucleotide
  modified_base 2: mod_base = OTHER; note = 2'Fluoro nucleotide
  modified_base 1..3: mod_base = OTHER; note = Phosphorothioate linkage
  modified_base 3..5: mod_base = OTHER; note = 2'-O-methyl nucleotide
  modified_base 6: mod_base = OTHER; note = 2'Fluoro nucleotide
  modified_base 7: mod_base = OTHER; note = 2'-O-methyl nucleotide
  modified_base 8..9: mod_base = OTHER; note = 2'Fluoro nucleotide
  modified_base 10..13: mod_base = OTHER; note = 2'-O-methyl nucleotide
  modified_base 14: mod_base = OTHER; note = 2'Fluoro nucleotide
  modified_base 15: mod_base = OTHER; note = 2'-O-methyl nucleotide
  modified_base 16: mod_base = OTHER; note = 2'Fluoro nucleotide
  modified_base 17..23: mod_base = OTHER; note = 2'-O-methyl nucleotide
  modified_base 21..23: mod_base = OTHER; note = Phosphorothioate linkage
aaaggcaaataacatgttagtat

SEQ ID NO: 573 - RNA, 23 nt, synthetic construct
  source 1..23: mol_type = other RNA
  modified_base 1: mod_base = OTHER; note = 2'-O-methyl nucleotide
  modified_base 2: mod_base = OTHER; note = 2'Fluoro nucleotide
  modified_base 1..3: mod_base = OTHER; note = Phosphorothioate linkage
  modified_base 3..5: mod_base = OTHER; note = 2'-O-methyl nucleotide
  modified_base 6: mod_base = OTHER; note = 2'Fluoro nucleotide
  modified_base 7: mod_base = OTHER; note = 2'-O-methyl nucleotide
  modified_base 8..9: mod_base = OTHER; note = 2'Fluoro nucleotide
  modified_base 10..13: mod_base = OTHER; note = 2'-O-methyl nucleotide
  modified_base 14: mod_base = OTHER; note = 2'Fluoro nucleotide
  modified_base 15: mod_base = OTHER; note = 2'-O-methyl nucleotide
  modified_base 16: mod_base = OTHER; note = 2'Fluoro nucleotide
  modified_base 17..23: mod_base = OTHER; note = 2'-O-methyl nucleotide
  modified_base 21..23: mod_base = OTHER; note = Phosphorothioate linkage
agaattcaaaaggcaaataacat

SEQ ID NO: 574 - RNA, 23 nt, synthetic construct
  source 1..23: mol_type = other RNA
  modified_base 1: mod_base = OTHER; note = 2'-O-methyl nucleotide
  modified_base 2: mod_base = OTHER; note = 2'Fluoro nucleotide
  modified_base 1..3: mod_base = OTHER; note = Phosphorothioate linkage
  modified_base 3..5: mod_base = OTHER; note = 2'-O-methyl nucleotide
  modified_base 6: mod_base = OTHER; note = 2'Fluoro nucleotide
  modified_base 7: mod_base = OTHER; note = 2'-O-methyl nucleotide
  modified_base 8..9: mod_base = OTHER; note = 2'Fluoro nucleotide
  modified_base 10..13: mod_base = OTHER; note = 2'-O-methyl nucleotide
  modified_base 14: mod_base = OTHER; note = 2'Fluoro nucleotide
  modified_base 15: mod_base = OTHER; note = 2'-O-methyl nucleotide
  modified_base 16: mod_base = OTHER; note = 2'Fluoro nucleotide
  modified_base 17..23: mod_base = OTHER; note = 2'-O-methyl nucleotide
  modified_base 21..23: mod_base = OTHER; note = Phosphorothioate linkage
ataatgagaattcaaaaggcaaa

SEQ ID NO: 575 - RNA, 23 nt, synthetic construct
  source 1..23: mol_type = other RNA
  modified_base 1: mod_base = OTHER; note = 2'-O-methyl nucleotide
  modified_base 2: mod_base = OTHER; note = 2'Fluoro nucleotide
  modified_base 1..3: mod_base = OTHER; note = Phosphorothioate linkage
  modified_base 3..5: mod_base = OTHER; note = 2'-O-methyl nucleotide
  modified_base 6: mod_base = OTHER; note = 2'Fluoro nucleotide
  modified_base 7: mod_base = OTHER; note = 2'-O-methyl nucleotide
  modified_base 8..9: mod_base = OTHER; note = 2'Fluoro nucleotide
  modified_base 10..13: mod_base = OTHER; note = 2'-O-methyl nucleotide
  modified_base 14: mod_base = OTHER; note = 2'Fluoro nucleotide
  modified_base 15: mod_base = OTHER; note = 2'-O-methyl nucleotide
  modified_base 16: mod_base = OTHER; note = 2'Fluoro nucleotide
  modified_base 17..23: mod_base = OTHER; note = 2'-O-methyl nucleotide
  modified_base 21..23: mod_base = OTHER; note = Phosphorothioate linkage
gataatgagaattcaaaaggcaa

SEQ ID NO: 576 - RNA, 23 nt, synthetic construct
  source 1..23: mol_type = other RNA
  modified_base 1: mod_base = OTHER; note = 2'-O-methyl nucleotide
  modified_base 2: mod_base = OTHER; note = 2'Fluoro nucleotide
  modified_base 1..3: mod_base = OTHER; note = Phosphorothioate linkage
  modified_base 3..5: mod_base = OTHER; note = 2'-O-methyl nucleotide
  modified_base 6: mod_base = OTHER; note = 2'Fluoro nucleotide
  modified_base 7: mod_base = OTHER; note = 2'-O-methyl nucleotide
  modified_base 8..9: mod_base = OTHER; note = 2'Fluoro nucleotide
  modified_base 10..13: mod_base = OTHER; note = 2'-O-methyl nucleotide
  modified_base 14: mod_base = OTHER; note = 2'Fluoro nucleotide
  modified_base 15: mod_base = OTHER; note = 2'-O-methyl nucleotide
  modified_base 16: mod_base = OTHER; note = 2'Fluoro nucleotide
  modified_base 17..23: mod_base = OTHER; note = 2'-O-methyl nucleotide
  modified_base 21..23: mod_base = OTHER; note = Phosphorothioate linkage
agataatgagaattcaaaaggca

SEQ ID NO: 577 - RNA, 23 nt, synthetic construct
  source 1..23: mol_type = other RNA
  modified_base 1: mod_base = OTHER; note = 2'-O-methyl nucleotide
  modified_base 2: mod_base = OTHER; note = 2'Fluoro nucleotide
  modified_base 1..3: mod_base = OTHER; note = Phosphorothioate linkage
  modified_base 3..5: mod_base = OTHER; note = 2'-O-methyl nucleotide
  modified_base 6: mod_base = OTHER; note = 2'Fluoro nucleotide
  modified_base 7: mod_base = OTHER; note = 2'-O-methyl nucleotide
  modified_base 8..9: mod_base = OTHER; note = 2'Fluoro nucleotide
  modified_base 10..13: mod_base = OTHER; note = 2'-O-methyl nucleotide
  modified_base 14: mod_base = OTHER; note = 2'Fluoro nucleotide
  modified_base 15: mod_base = OTHER; note = 2'-O-methyl nucleotide
  modified_base 16: mod_base = OTHER; note = 2'Fluoro nucleotide
  modified_base 17..23: mod_base = OTHER; note = 2'-O-methyl nucleotide
  modified_base 21..23: mod_base = OTHER; note = Phosphorothioate linkage
aagataatgagaattcaaaaggc

SEQ ID NO: 578 - RNA, 23 nt, synthetic construct
  source 1..23: mol_type = other RNA
  modified_base 1: mod_base = OTHER; note = 2'-O-methyl nucleotide
  modified_base 2: mod_base = OTHER; note = 2'Fluoro nucleotide
  modified_base 1..3: mod_base = OTHER; note = Phosphorothioate linkage
  modified_base 3..5: mod_base = OTHER; note = 2'-O-methyl nucleotide
  modified_base 6: mod_base = OTHER; note = 2'Fluoro nucleotide
  modified_base 7: mod_base = OTHER; note = 2'-O-methyl nucleotide
  modified_base 8..9: mod_base = OTHER; note = 2'Fluoro nucleotide
  modified_base 10..13: mod_base = OTHER; note = 2'-O-methyl nucleotide
  modified_base 14: mod_base = OTHER; note = 2'Fluoro nucleotide
  modified_base 15: mod_base = OTHER; note = 2'-O-methyl nucleotide
  modified_base 16: mod_base = OTHER; note = 2'Fluoro nucleotide
  modified_base 17..23: mod_base = OTHER; note = 2'-O-methyl nucleotide
  modified_base 21..23: mod_base = OTHER; note = Phosphorothioate linkage
ttttaagataatgagaattcaaa

SEQ ID NO: 579 - RNA, 23 nt, synthetic construct
  source 1..23: mol_type = other RNA
  modified_base 1: mod_base = OTHER; note = 2'-O-methyl nucleotide
  modified_base 2: mod_base = OTHER; note = 2'Fluoro nucleotide
  modified_base 1..3: mod_base = OTHER; note = Phosphorothioate linkage
  modified_base 3..5: mod_base = OTHER; note = 2'-O-methyl nucleotide
  modified_base 6: mod_base = OTHER; note = 2'Fluoro nucleotide
  modified_base 7: mod_base = OTHER; note = 2'-O-methyl nucleotide
  modified_base 8..9: mod_base = OTHER; note = 2'Fluoro nucleotide
  modified_base 10..13: mod_base = OTHER; note = 2'-O-methyl nucleotide
  modified_base 14: mod_base = OTHER; note = 2'Fluoro nucleotide
  modified_base 15: mod_base = OTHER; note = 2'-O-methyl nucleotide
  modified_base 16: mod_base = OTHER; note = 2'Fluoro nucleotide
  modified_base 17..23: mod_base = OTHER; note = 2'-O-methyl nucleotide
  modified_base 21..23: mod_base = OTHER; note = Phosphorothioate linkage
attttaagataatgagaattcaa

SEQ ID NO: 580 - RNA, 23 nt, synthetic construct
  source 1..23: mol_type = other RNA
  modified_base 1: mod_base = OTHER; note = 2'-O-methyl nucleotide
  modified_base 2: mod_base = OTHER; note = 2'Fluoro nucleotide
  modified_base 1..3: mod_base = OTHER; note = Phosphorothioate linkage
  modified_base 3..5: mod_base = OTHER; note = 2'-O-methyl nucleotide
  modified_base 6: mod_base = OTHER; note = 2'Fluoro nucleotide
  modified_base 7: mod_base = OTHER; note = 2'-O-methyl nucleotide
  modified_base 8..9: mod_base = OTHER; note = 2'Fluoro nucleotide
  modified_base 10..13: mod_base = OTHER; note = 2'-O-methyl nucleotide
  modified_base 14: mod_base = OTHER; note = 2'Fluoro nucleotide
  modified_base 15: mod_base = OTHER; note = 2'-O-methyl nucleotide
  modified_base 16: mod_base = OTHER; note = 2'Fluoro nucleotide
  modified_base 17..23: mod_base = OTHER; note = 2'-O-methyl nucleotide
  modified_base 21..23: mod_base = OTHER; note = Phosphorothioate linkage
atgtaatcacatgtcacacggcc

SEQ ID NO: 581 - RNA, 23 nt, synthetic construct
  source 1..23: mol_type = other RNA
  modified_base 1: mod_base = OTHER; note = 2'-O-methyl nucleotide
  modified_base 2: mod_base = OTHER; note = 2'Fluoro nucleotide
  modified_base 1..3: mod_base = OTHER; note = Phosphorothioate linkage
  modified_base 3..5: mod_base = OTHER; note = 2'-O-methyl nucleotide
  modified_base 6: mod_base = OTHER; note = 2'Fluoro nucleotide
  modified_base 7: mod_base = OTHER; note = 2'-O-methyl nucleotide
  modified_base 8..9: mod_base = OTHER; note = 2'Fluoro nucleotide
  modified_base 10..13: mod_base = OTHER; note = 2'-O-methyl nucleotide
  modified_base 14: mod_base = OTHER; note = 2'Fluoro nucleotide
  modified_base 15: mod_base = OTHER; note = 2'-O-methyl nucleotide
  modified_base 16: mod_base = OTHER; note = 2'Fluoro nucleotide
  modified_base 17..23: mod_base = OTHER; note = 2'-O-methyl nucleotide
  modified_base 21..23: mod_base = OTHER; note = Phosphorothioate linkage
atgatgtaatcacatgtcacacg

SEQ ID NO: 582 - RNA, 23 nt, synthetic construct
  source 1..23: mol_type = other RNA
  modified_base 1: mod_base = OTHER; note = 2'-O-methyl nucleotide
  modified_base 2: mod_base = OTHER; note = 2'Fluoro nucleotide
  modified_base 1..3: mod_base = OTHER; note = Phosphorothioate linkage
  modified_base 3..5: mod_base = OTHER; note = 2'-O-methyl nucleotide
  modified_base 6: mod_base = OTHER; note = 2'Fluoro nucleotide
  modified_base 7: mod_base = OTHER; note = 2'-O-methyl nucleotide
  modified_base 8..9: mod_base = OTHER; note = 2'Fluoro nucleotide
  modified_base 10..13: mod_base = OTHER; note = 2'-O-methyl nucleotide
  modified_base 14: mod_base = OTHER; note = 2'Fluoro nucleotide
  modified_base 15: mod_base = OTHER; note = 2'-O-methyl nucleotide
  modified_base 16: mod_base = OTHER; note = 2'Fluoro nucleotide
  modified_base 17..23: mod_base = OTHER; note = 2'-O-methyl nucleotide
  modified_base 21..23: mod_base = OTHER; note = Phosphorothioate linkage
agatgatgtaatcacatgtcaca

SEQ ID NO: 583 - RNA, 23 nt, synthetic construct
  source 1..23: mol_type = other RNA
  modified_base 1: mod_base = OTHER; note = 2'-O-methyl nucleotide
  modified_base 2: mod_base = OTHER; note = 2'Fluoro nucleotide
  modified_base 1..3: mod_base = OTHER; note = Phosphorothioate linkage
  modified_base 3..5: mod_base = OTHER; note = 2'-O-methyl nucleotide
  modified_base 6: mod_base = OTHER; note = 2'Fluoro nucleotide
  modified_base 7: mod_base = OTHER; note = 2'-O-methyl nucleotide
  modified_base 8..9: mod_base = OTHER; note = 2'Fluoro nucleotide
  modified_base 10..13: mod_base = OTHER; note = 2'-O-methyl nucleotide
  modified_base 14: mod_base = OTHER; note = 2'Fluoro nucleotide
  modified_base 15: mod_base = OTHER; note = 2'-O-methyl nucleotide
  modified_base 16: mod_base = OTHER; note = 2'Fluoro nucleotide
  modified_base 17..23: mod_base = OTHER; note = 2'-O-methyl nucleotide
  modified_base 21..23: mod_base = OTHER; note = Phosphorothioate linkage
aagatgatgtaatcacatgtcac

SEQ ID NO: 584 - RNA, 23 nt, synthetic construct
  source 1..23: mol_type = other RNA
  modified_base 1: mod_base = OTHER; note = 2'-O-methyl nucleotide
  modified_base 2: mod_base = OTHER; note = 2'Fluoro nucleotide
  modified_base 1..3: mod_base = OTHER; note = Phosphorothioate linkage
  modified_base 3..5: mod_base = OTHER; note = 2'-O-methyl nucleotide
  modified_base 6: mod_base = OTHER; note = 2'Fluoro nucleotide
  modified_base 7: mod_base = OTHER; note = 2'-O-methyl nucleotide
  modified_base 8..9: mod_base = OTHER; note = 2'Fluoro nucleotide
  modified_base 10..13: mod_base = OTHER; note = 2'-O-methyl nucleotide
  modified_base 14: mod_base = OTHER; note = 2'Fluoro nucleotide
  modified_base 15: mod_base = OTHER; note = 2'-O-methyl nucleotide
  modified_base 16: mod_base = OTHER; note = 2'Fluoro nucleotide
  modified_base 17..23: mod_base = OTHER; note = 2'-O-methyl nucleotide
  modified_base 21..23: mod_base = OTHER; note = Phosphorothioate linkage
ttaacaatgatgtcagaaagatg

SEQ ID NO: 585 - RNA, 23 nt, synthetic construct
  source 1..23: mol_type = other RNA
  modified_base 1: mod_base = OTHER; note = 2'-O-methyl nucleotide
  modified_base 2: mod_base = OTHER; note = 2'Fluoro nucleotide
  modified_base 1..3: mod_base = OTHER; note = Phosphorothioate linkage
  modified_base 3..5: mod_base = OTHER; note = 2'-O-methyl nucleotide
  modified_base 6: mod_base = OTHER; note = 2'Fluoro nucleotide
  modified_base 7: mod_base = OTHER; note = 2'-O-methyl nucleotide
  modified_base 8..9: mod_base = OTHER; note = 2'Fluoro nucleotide
  modified_base 10..13: mod_base = OTHER; note = 2'-O-methyl nucleotide
  modified_base 14: mod_base = OTHER; note = 2'Fluoro nucleotide
  modified_base 15: mod_base = OTHER; note = 2'-O-methyl nucleotide
  modified_base 16: mod_base = OTHER; note = 2'Fluoro nucleotide
  modified_base 17..23: mod_base = OTHER; note = 2'-O-methyl nucleotide
  modified_base 21..23: mod_base = OTHER; note = Phosphorothioate linkage
attaacaatgatgtcagaaagat

SEQ ID NO: 586 - RNA, 23 nt, synthetic construct
  source 1..23: mol_type = other RNA
  modified_base 1: mod_base = OTHER; note = 2'-O-methyl nucleotide
  modified_base 2: mod_base = OTHER; note = 2'Fluoro nucleotide
  modified_base 1..3: mod_base = OTHER; note = Phosphorothioate linkage
  modified_base 3..5: mod_base = OTHER; note = 2'-O-methyl nucleotide
  modified_base 6: mod_base = OTHER; note = 2'Fluoro nucleotide
  modified_base 7: mod_base = OTHER; note = 2'-O-methyl nucleotide
  modified_base 8..9: mod_base = OTHER; note = 2'Fluoro nucleotide
  modified_base 10..13: mod_base = OTHER; note = 2'-O-methyl nucleotide
  modified_base 14: mod_base = OTHER; note = 2'Fluoro nucleotide
  modified_base 15: mod_base = OTHER; note = 2'-O-methyl nucleotide
  modified_base 16: mod_base = OTHER; note = 2'Fluoro nucleotide
  modified_base 17..23: mod_base = OTHER; note = 2'-O-methyl nucleotide
  modified_base 21..23: mod_base = OTHER; note = Phosphorothioate linkage
cattccattaacaatgatgtcag

SEQ ID NO: 587 - RNA, 23 nt, synthetic construct
  source 1..23: mol_type = other RNA
  modified_base 1: mod_base = OTHER; note = 2'-O-methyl nucleotide
  modified_base 2: mod_base = OTHER; note = 2'Fluoro nucleotide
  modified_base 1..3: mod_base = OTHER; note = Phosphorothioate linkage
  modified_base 3..5: mod_base = OTHER; note = 2'-O-methyl nucleotide
  modified_base 6: mod_base = OTHER; note = 2'Fluoro nucleotide
  modified_base 7: mod_base = OTHER; note = 2'-O-methyl nucleotide
  modified_base 8..9: mod_base = OTHER; note = 2'Fluoro nucleotide
  modified_base 10..13: mod_base = OTHER; note = 2'-O-methyl nucleotide
  modified_base 14: mod_base = OTHER; note = 2'Fluoro nucleotide
  modified_base 15: mod_base = OTHER; note = 2'-O-methyl nucleotide
  modified_base 16: mod_base = OTHER; note = 2'Fluoro nucleotide
  modified_base 17..23: mod_base = OTHER; note = 2'-O-methyl nucleotide
  modified_base 21..23: mod_base = OTHER; note = Phosphorothioate linkage
acaagcacacattccattaacaa

SEQ ID NO: 588 - RNA, 2460 nt, Homo sapiens
  source 1..2460: mol_type = other RNA
agtagccagacatgagctgtgagggtcaagcacagctatccatcagatgatctactttcagccttcctgagtcccagacaatagaagacaggtggctgtacccttggccaagggtaggtgtggcagtggtgtctgctgtcactgtgccctcattggcccccagcaatcagactcaacagacggagcaactgccatccgaggctcctgaaccagggccattcaccaggagcatgcggctccctgatgtccagctctggctggtgctgctgtgggcactggtgcgagcacaggggacagggtctgtgtgtccctcctgtgggggctccaaactggcaccccaagcagaacgagctctggtgctggagctagccaagcagcaaatcctggatgggttgcacctgaccagtcgtcccagaataactcatcctccaccccaggcagcgctgaccagagccctccggagactacagccagggagtgtggctccagggaatggggaggaggtcatcagctttgctactgtcacagactccacttcagcctacagctccctgctcacttttcacctgtccactcctcggtcccaccacctgtaccatgcccgcctgtggctgcacgtgctccccacccttcctggcactctttgcttgaggatcttccgatggggaccaaggaggaggcgccaagggtcccgcactctcctggctgagcaccacatcaccaacctgggctggcataccttaactctgccctctagtggcttgaggggtgagaagtctggtgtcctgaaactgcaactagactgcagacccctagaaggcaacagcacagttactggacaaccgaggcggctcttggacacagcaggacaccagcagcccttcctagagcttaagatccgagccaatgagcctggagcaggccgggccaggaggaggacccccacctgtgagcctgcgacccccttatgttgcaggcgagaccattacgtagacttccaggaactgggatggcgggactggatactgcagcccgaggggtaccagctgaattactgcagtgggcagtgccctccccacctggctggcagcccaggcattgctgcctctttccattctgccgtcttcagcctcctcaaagccaacaatccttggcctgccagtacctcctgttgtgtccctactgcccgaaggcccctctctctcctctacctggatcataatggcaatgtggtcaagacggatgtgccagatatggtggtggaggcctgtggctgcagctagcaagaggacctggggctttggagtgaagagaccaagatgaagtttcccaggcacagggcatctgtgactggaggcatcagattcctgatccacaccccaacccaacaaccacctggcaatatgactcacttgacccctatgggacccaaatgggcactttcttgtctgagactctggcttattccaggttggctgatgtgttgggagatgggtaaagcgtttcttctaaaggggtctacccagaaagcatgatttcctgccctaagtcctgtgagaagatgtcagggactagggagggagggagggaaggcagagaaaaattacttagcctctcccaagatgagaaagtcctcaagtgaggggaggaggaagcagatagatggtccagcaggcttgaagcagggtaagcaggctggcccagggtaagggctgttgaggtaccttaagggaaggtcaagagggagatgggcaaggcgctgagggaggatgcttaggggacccccagaaacaggagtcaggaaaatgaggcactaagcctaagaagttccctggtttttcccaggggacaggacccactgggagacaagcatttatactttctttcttcttttttatttttttgagatcgagtctcgctctgtcaccaggctggagtgcagtgacacgatcttggctcactgcaacctccgtctcctgggttcaagtgattcttctgcctcagcctcccgagcagctgggattacaggcgcccactaatttttgtattcttagtagaaacgaggtttcaacatgttggccaggatggtctcaatctcttgacctcttgatccacccgacttggcctcccgaagtgatgagattataggcgtgagccaccgcgcctggcttatactttcttaataaaaaggagaaagaaaatcaacaaatgtgagtcataaagaagggttagggtgatggtccagagcaacagttcttcaagtgtactctgtaggcttctgggaggtcccttttcaggggtgtccacaaagtcaaagctattttcataataatactaacatgttatttgccttttgaattctcattatcttaaaattgtattgtggagttttccagaggccgtgtgacatgtgattacatcatctttctgacatcattgttaatggaatgtgtgcttgta

SEQ ID NO: 589 - RNA, 20 nt, synthetic construct
  source 1..20: mol_type = other RNA
actctttgcttgaggatctt

SEQ ID NO: 590 - RNA, 20 nt, synthetic construct
  source 1..20: mol_type = other RNA
actctttgcttgaggatctt

SEQ ID NO: 591 - RNA, 20 nt, synthetic construct
  source 1..20: mol_type = other RNA
acaagcatttatactttctt

SEQ ID NO: 592 - RNA, 20 nt, synthetic construct
  source 1..20: mol_type = other RNA
acaagcatttatactttctt

SEQ ID NO: 593 - RNA, 20 nt, synthetic construct
  source 1..20: mol_type = other RNA
ggcttatactttcttaataa

SEQ ID NO: 594 - DNA, 23 bp, synthetic construct
  source 1..23: mol_type = other DNA
  misc_feature 1: note = DNA
  misc_feature 2..23: note = RNA
tggcttatactttcttaataatt

SEQ ID NO: 595 - RNA, 21 nt, synthetic construct
  source 1..21: mol_type = other RNA
acaagcatttatactttcttt

SEQ ID NO: 596 - RNA, 21 nt, synthetic construct
  source 1..21: mol_type = other RNA
tgaagagaccaagatgaagtt

SEQ ID NO: 597 - RNA, 21 nt, synthetic construct
  source 1..21: mol_type = other RNA
aatgggcactttcttgtctga

SEQ ID NO: 598 - RNA, 23 nt, synthetic construct
  source 1..23: mol_type = other RNA
aagatcctcaagcaaagagtgcc

SEQ ID NO: 599 - RNA, 23 nt, synthetic construct
  source 1..23: mol_type = other RNA
aagatcctcaagcaaagagtgcc

SEQ ID NO: 600 - RNA, 23 nt, synthetic construct
  source 1..23: mol_type = other RNA
aagaaagtataaatgcttgtctc

SEQ ID NO: 601 - RNA, 23 nt, synthetic construct
  source 1..23: mol_type = other RNA
aagaaagtataaatgcttgtctc

SEQ ID NO: 602 - RNA, 23 nt, synthetic construct
  source 1..23: mol_type = other RNA
ttattaagaaagtataagccagg

SEQ ID NO: 603 - RNA, 23 nt, synthetic construct
  source 1..23: mol_type = other RNA
ttattaagaaagtataagccagg

SEQ ID NO: 604 - RNA, 23 nt, synthetic construct
  source 1..23: mol_type = other RNA
taagaaagtataaatgcttgtct

SEQ ID NO: 605 - RNA, 23 nt, synthetic construct
  source 1..23: mol_type = other RNA
tacttcatcttggtctcttcact

SEQ ID NO: 606 - RNA, 23 nt, synthetic construct
  source 1..23: mol_type = other RNA
tcagacaagaaagtgcccatttg

SEQ ID NO: 607 - RNA, 20 nt, synthetic construct
  source 1..20: mol_type = other RNA
  modified_base 1..5: mod_base = OTHER; note = 2'-O-methyl nucleotide
  modified_base 1..3: mod_base = OTHER; note = Phosphorothioate linkage
  modified_base 6: mod_base = OTHER; note = 2'Fluoro nucleotide
  modified_base 7: mod_base = OTHER; note = 2'-O-methyl nucleotide
  modified_base 8..10: mod_base = OTHER; note = 2'Fluoro nucleotide
  modified_base 11: mod_base = OTHER; note = 2'-O-methyl nucleotide
  modified_base 12: mod_base = OTHER; note = 2'Fluoro nucleotide
  modified_base 13..20: mod_base = OTHER; note = 2'-O-methyl nucleotide
actctttgcttgaggatctt

SEQ ID NO: 608 - RNA, 20 nt, synthetic construct
  source 1..20: mol_type = other RNA
  modified_base 1..5: mod_base = OTHER; note = 2'-O-methyl nucleotide
  modified_base 1..3: mod_base = OTHER; note = Phosphorothioate linkage
  modified_base 6: mod_base = OTHER; note = 2'Fluoro nucleotide
  modified_base 7: mod_base = OTHER; note = 2'-O-methyl nucleotide
  modified_base 8..10: mod_base = OTHER; note = 2'Fluoro nucleotide
  modified_base 11: mod_base = OTHER; note = 2'-O-methyl nucleotide
  modified_base 12: mod_base = OTHER; note = 2'Fluoro nucleotide
  modified_base 13..16: mod_base = OTHER; note = 2'-O-methyl nucleotide
  modified_base 17: mod_base = OTHER; note = TNA analog with a uracil base
  modified_base 18..19: mod_base = OTHER; note = 2'-O-methyl nucleotide
  modified_base 20: mod_base = OTHER; note = nucleotide with a modified sugar and a uracil base
actctttgcttgaggatctt

SEQ ID NO: 609 - RNA, 20 nt, synthetic construct
  source 1..20: mol_type = other RNA
  modified_base 1..5: mod_base = OTHER; note = 2'-O-methyl nucleotide
  modified_base 1..3: mod_base = OTHER; note = Phosphorothioate linkage
  modified_base 6: mod_base = OTHER; note = 2'Fluoro nucleotide
  modified_base 7: mod_base = OTHER; note = 2'-O-methyl nucleotide
  modified_base 8..10: mod_base = OTHER; note = 2'Fluoro nucleotide
  modified_base 11: mod_base = OTHER; note = 2'-O-methyl nucleotide
  modified_base 12: mod_base = OTHER; note = 2'Fluoro nucleotide
  modified_base 13..20: mod_base = OTHER; note = 2'-O-methyl nucleotide
acaagcatttatactttctt

SEQ ID NO: 610 - RNA, 20 nt, synthetic construct
  source 1..20: mol_type = other RNA
  modified_base 1..5: mod_base = OTHER; note = 2'-O-methyl nucleotide
  modified_base 1..3: mod_base = OTHER; note = Phosphorothioate linkage
  modified_base 6: mod_base = OTHER; note = 2'Fluoro nucleotide
  modified_base 7: mod_base = OTHER; note = 2'-O-methyl nucleotide
  modified_base 8..10: mod_base = OTHER; note = 2'Fluoro nucleotide
  modified_base 11: mod_base = OTHER; note = 2'-O-methyl nucleotide
  modified_base 12: mod_base = OTHER; note = 2'Fluoro nucleotide
  modified_base 13..19: mod_base = OTHER; note = 2'-O-methyl nucleotide
  modified_base 20: mod_base = OTHER; note = nucleotide with a modified sugar and a uracil base
acaagcatttatactttctt

SEQ ID NO: 611 - RNA, 20 nt, synthetic construct
  source 1..20: mol_type = other RNA
  modified_base 1..5: mod_base = OTHER; note = 2'-O-methyl nucleotide
  modified_base 1..3: mod_base = OTHER; note = Phosphorothioate linkage
  modified_base 6: mod_base = OTHER; note = 2'Fluoro nucleotide
  modified_base 7: mod_base = OTHER; note = 2'-O-methyl nucleotide
  modified_base 8..10: mod_base = OTHER; note = 2'Fluoro nucleotide
  modified_base 11: mod_base = OTHER; note = 2'-O-methyl nucleotide
  modified_base 12: mod_base = OTHER; note = 2'Fluoro nucleotide
  modified_base 13..20: mod_base = OTHER; note = 2'-O-methyl nucleotide
ggcttatactttcttaataa

SEQ ID NO: 612 - RNA, 23 nt, synthetic construct
  source 1..23: mol_type = other RNA
  modified_base 1: mod_base = OTHER; note = inverted deoxyribonucleotide
  modified_base 2..6: mod_base = OTHER; note = 2'-O-methyl nucleotide
  modified_base 1..4: mod_base = OTHER; note = Phosphorothioate linkage
  modified_base 7: mod_base = OTHER; note = 2'Fluoro nucleotide
  modified_base 8: mod_base = OTHER; note = 2'-O-methyl nucleotide
  modified_base 9..11: mod_base = OTHER; note = 2'Fluoro nucleotide
  modified_base 12: mod_base = OTHER; note = 2'-O-methyl nucleotide
  modified_base 13: mod_base = OTHER; note = 2'Fluoro nucleotide
  modified_base 14..17: mod_base = OTHER; note = 2'-O-methyl nucleotide
  modified_base 18: mod_base = OTHER; note = TNA analog with a adenine base
  modified_base 19..22: mod_base = OTHER; note = 2'-O-methyl nucleotide
  modified_base 23: mod_base = OTHER; note = siRNA nucleotide with a modified sugar and a uracil base
tggcttatactttcttaataatt

SEQ ID NO: 613 - RNA, 21 nt, synthetic construct
  source 1..21: mol_type = other RNA
  modified_base 1..8: mod_base = OTHER; note = 2'-O-methyl nucleotide
  modified_base 1..3: mod_base = OTHER; note = Phosphorothioate linkage
  modified_base 9..11: mod_base = OTHER; note = 2'Fluoro nucleotide
  modified_base 12..21: mod_base = OTHER; note = 2'-O-methyl nucleotide
acaagcatttatactttcttt

SEQ ID NO: 614 - RNA, 21 nt, synthetic construct
  source 1..21: mol_type = other RNA
  modified_base 1..8: mod_base = OTHER; note = 2'-O-methyl nucleotide
  modified_base 1..3: mod_base = OTHER; note = Phosphorothioate linkage
  modified_base 9..11: mod_base = OTHER; note = 2'Fluoro nucleotide
  modified_base 12..21: mod_base = OTHER; note = 2'-O-methyl nucleotide
tgaagagaccaagatgaagtt

SEQ ID NO: 615 - RNA, 21 nt, synthetic construct
  source 1..21: mol_type = other RNA
  modified_base 1..8: mod_base = OTHER; note = 2'-O-methyl nucleotide
  modified_base 1..3: mod_base = OTHER; note = Phosphorothioate linkage
  modified_base 9..11: mod_base = OTHER; note = 2'Fluoro nucleotide
  modified_base 12..21: mod_base = OTHER; note = 2'-O-methyl nucleotide
aatgggcactttcttgtctga

SEQ ID NO: 616 - RNA, 23 nt, synthetic construct
  source 1..23: mol_type = other RNA
  modified_base 1: mod_base = OTHER; note = 2'-O-methyl nucleotide
  modified_base 2: mod_base = OTHER; note = 2'Fluoro nucleotide
  modified_base 3: mod_base = OTHER; note = 2'-O-methyl nucleotide
  modified_base 1..3: mod_base = OTHER; note = Phosphorothioate linkage
  modified_base 4: mod_base = OTHER; note = 2'Fluoro nucleotide
  modified_base 5: mod_base = OTHER; note = 2'-O-methyl nucleotide
  modified_base 6: mod_base = OTHER; note = 2'Fluoro nucleotide
  modified_base 7: mod_base = OTHER; note = 2'-O-methyl nucleotide
  modified_base 8: mod_base = OTHER; note = 2'Fluoro nucleotide
  modified_base 9..13: mod_base = OTHER; note = 2'-O-methyl nucleotide
  modified_base 14: mod_base = OTHER; note = 2'Fluoro nucleotide
  modified_base 15: mod_base = OTHER; note = 2'-O-methyl nucleotide
  modified_base 16: mod_base = OTHER; note = 2'Fluoro nucleotide
  modified_base 17..23: mod_base = OTHER; note = 2'-O-methyl nucleotide
  modified_base 21..23: mod_base = OTHER; note = Phosphorothioate linkage
aagatcctcaagcaaagagtgcc

SEQ ID NO: 617 - RNA, 23 nt, synthetic construct
  source 1..23: mol_type = other RNA
  modified_base 1: mod_base = OTHER; note = 2'-O-methyl nucleotide
  modified_base 2: mod_base = OTHER; note = 2'Fluoro nucleotide
  modified_base 3: mod_base = OTHER; note = 2'-O-methyl nucleotide
  modified_base 1..3: mod_base = OTHER; note = Phosphorothioate linkage
  modified_base 4: mod_base = OTHER; note = 2'Fluoro nucleotide
  modified_base 5: mod_base = OTHER; note = 2'-O-methyl nucleotide
  modified_base 6: mod_base = OTHER; note = 2'Fluoro nucleotide
  modified_base 7: mod_base = OTHER; note = 2'-O-methyl nucleotide
  modified_base 8: mod_base = OTHER; note = 2'Fluoro nucleotide
  modified_base 9..13: mod_base = OTHER; note = 2'-O-methyl nucleotide
  modified_base 14: mod_base = OTHER; note = 2'Fluoro nucleotide
  modified_base 15: mod_base = OTHER; note = 2'-O-methyl nucleotide
  modified_base 16: mod_base = OTHER; note = 2'Fluoro nucleotide
  modified_base 17..23: mod_base = OTHER; note = 2'-O-methyl nucleotide
  modified_base 21..23: mod_base = OTHER; note = Phosphorothioate linkage
aagatcctcaagcaaagagtgcc

SEQ ID NO: 618 - RNA, 23 nt, synthetic construct
  source 1..23: mol_type = other RNA
  modified_base 1: mod_base = OTHER; note = 2'-O-methyl nucleotide
  modified_base 2: mod_base = OTHER; note = 2'Fluoro nucleotide
  modified_base 3..5: mod_base = OTHER; note = 2'-O-methyl nucleotide
  modified_base 1..3: mod_base = OTHER; note = Phosphorothioate linkage
  modified_base 6: mod_base = OTHER; note = 2'Fluoro nucleotide
  modified_base 7: mod_base = OTHER; note = 2'-O-methyl nucleotide
  modified_base 8: mod_base = OTHER; note = 2'Fluoro nucleotide
  modified_base 9..13: mod_base = OTHER; note = 2'-O-methyl nucleotide
  modified_base 14: mod_base = OTHER; note = 2'Fluoro nucleotide
  modified_base 15..23: mod_base = OTHER; note = 2'-O-methyl nucleotide
  modified_base 21..23: mod_base = OTHER; note = Phosphorothioate linkage
aagaaagtataaatgcttgtctc

SEQ ID NO: 619 - RNA, 23 nt, synthetic construct
  source 1..23: mol_type = other RNA
  modified_base 1: mod_base = OTHER; note = 2'-O-methyl nucleotide
  modified_base 2: mod_base = OTHER; note = 2'Fluoro nucleotide
  modified_base 3..5: mod_base = OTHER; note = 2'-O-methyl nucleotide
  modified_base 1..3: mod_base = OTHER; note = Phosphorothioate linkage
  modified_base 6: mod_base = OTHER; note = 2'Fluoro nucleotide
  modified_base 7: mod_base = OTHER; note = 2'-O-methyl nucleotide
  modified_base 8: mod_base = OTHER; note = 2'Fluoro nucleotide
  modified_base 9..13: mod_base = OTHER; note = 2'-O-methyl nucleotide
  modified_base 14: mod_base = OTHER; note = 2'Fluoro nucleotide
  modified_base 15..23: mod_base = OTHER; note = 2'-O-methyl nucleotide
  modified_base 21..23: mod_base = OTHER; note = Phosphorothioate linkage
aagaaagtataaatgcttgtctc

SEQ ID NO: 620 - RNA, 23 nt, synthetic construct
  source 1..23: mol_type = other RNA
  modified_base 1: mod_base = OTHER; note = 2'-O-methyl nucleotide
  modified_base 2: mod_base = OTHER; note = 2'Fluoro nucleotide
  modified_base 3: mod_base = OTHER; note = 2'-O-methyl nucleotide
  modified_base 1..3: mod_base = OTHER; note = Phosphorothioate linkage
  modified_base 4: mod_base = OTHER; note = 2'Fluoro nucleotide
  modified_base 5: mod_base = OTHER; note = 2'-O-methyl nucleotide
  modified_base 6: mod_base = OTHER; note = 2'Fluoro nucleotide
  modified_base 7: mod_base = OTHER; note = 2'-O-methyl nucleotide
  modified_base 8: mod_base = OTHER; note = 2'Fluoro nucleotide
  modified_base 9..13: mod_base = OTHER; note = 2'-O-methyl nucleotide
  modified_base 14: mod_base = OTHER; note = 2'Fluoro nucleotide
  modified_base 15: mod_base = OTHER; note = 2'-O-methyl nucleotide
  modified_base 16: mod_base = OTHER; note = 2'Fluoro nucleotide
  modified_base 17..23: mod_base = OTHER; note = 2'-O-methyl nucleotide
  modified_base 21..23: mod_base = OTHER; note = Phosphorothioate linkage
ttattaagaaagtataagccagg

SEQ ID NO: 621 - RNA, 23 nt, synthetic construct
  source 1..23: mol_type = other RNA
  modified_base 1: mod_base = OTHER; note = 2'-O-methyl nucleotide
  modified_base 2: mod_base = OTHER; note = 2'Fluoro nucleotide
  modified_base 3: mod_base = OTHER; note = 2'-O-methyl nucleotide
  modified_base 1..3: mod_base = OTHER; note = Phosphorothioate linkage
  modified_base 4: mod_base = OTHER; note = 2'Fluoro nucleotide
  modified_base 5: mod_base = OTHER; note = 2'-O-methyl nucleotide
  modified_base 6: mod_base = OTHER; note = 2'Fluoro nucleotide
  modified_base 7: mod_base = OTHER; note = 2'-O-methyl nucleotide
  modified_base 8: mod_base = OTHER; note = 2'Fluoro nucleotide
  modified_base 9..13: mod_base = OTHER; note = 2'-O-methyl nucleotide
  modified_base 14: mod_base = OTHER; note = 2'Fluoro nucleotide
  modified_base 15: mod_base = OTHER; note = 2'-O-methyl nucleotide
  modified_base 16: mod_base = OTHER; note = 2'Fluoro nucleotide
  modified_base 17..23: mod_base = OTHER; note = 2'-O-methyl nucleotide
  modified_base 21..23: mod_base = OTHER; note = Phosphorothioate linkage
ttattaagaaagtataagccagg

SEQ ID NO: 622 - RNA, 23 nt, synthetic construct
  source 1..23: mol_type = other RNA
  modified_base 1: mod_base = OTHER; note = 2'-O-methyl nucleotide
  modified_base 2: mod_base = OTHER; note = 2'Fluoro nucleotide
  modified_base 3: mod_base = OTHER; note = 2'-O-methyl nucleotide
  modified_base 1..3: mod_base = OTHER; note = Phosphorothioate linkage
  modified_base 4: mod_base = OTHER; note = 2'Fluoro nucleotide
  modified_base 5: mod_base = OTHER; note = 2'-O-methyl nucleotide
  modified_base 6: mod_base = OTHER; note = 2'Fluoro nucleotide
  modified_base 7: mod_base = OTHER; note = 2'-O-methyl nucleotide
  modified_base 8: mod_base = OTHER; note = 2'Fluoro nucleotide
  modified_base 9..13: mod_base = OTHER; note = 2'-O-methyl nucleotide
  modified_base 14: mod_base = OTHER; note = 2'Fluoro nucleotide
  modified_base 15: mod_base = OTHER; note = 2'-O-methyl nucleotide
  modified_base 16: mod_base = OTHER; note = 2'Fluoro nucleotide
  modified_base 17..23: mod_base = OTHER; note = 2'-O-methyl nucleotide
taagaaagtataaatgcttgtct

SEQ ID NO: 623 - RNA, 23 nt, synthetic construct
  source 1..23: mol_type = other RNA
  modified_base 1: mod_base = OTHER; note = 2'-O-methyl nucleotide
  modified_base 2: mod_base = OTHER; note = 2'Fluoro nucleotide
  modified_base 3: mod_base = OTHER; note = 2'-O-methyl nucleotide
  modified_base 1..3: mod_base = OTHER; note = Phosphorothioate linkage
  modified_base 4: mod_base = OTHER; note = 2'Fluoro nucleotide
  modified_base 5: mod_base = OTHER; note = 2'-O-methyl nucleotide
  modified_base 6: mod_base = OTHER; note = 2'Fluoro nucleotide
  modified_base 7: mod_base = OTHER; note = 2'-O-methyl nucleotide
  modified_base 8: mod_base = OTHER; note = 2'Fluoro nucleotide
  modified_base 9..13: mod_base = OTHER; note = 2'-O-methyl nucleotide
  modified_base 14: mod_base = OTHER; note = 2'Fluoro nucleotide
  modified_base 15: mod_base = OTHER; note = 2'-O-methyl nucleotide
  modified_base 16: mod_base = OTHER; note = 2'Fluoro nucleotide
  modified_base 17..23: mod_base = OTHER; note = 2'-O-methyl nucleotide
tacttcatcttggtctcttcact

SEQ ID NO: 624 - RNA, 23 nt, synthetic construct
  source 1..23: mol_type = other RNA
  modified_base 1: mod_base = OTHER; note = 2'-O-methyl nucleotide
  modified_base 2: mod_base = OTHER; note = 2'Fluoro nucleotide
  modified_base 3: mod_base = OTHER; note = 2'-O-methyl nucleotide
  modified_base 1..3: mod_base = OTHER; note = Phosphorothioate linkage
  modified_base 4: mod_base = OTHER; note = 2'Fluoro nucleotide
  modified_base 5: mod_base = OTHER; note = 2'-O-methyl nucleotide
  modified_base 6: mod_base = OTHER; note = 2'Fluoro nucleotide
  modified_base 7: mod_base = OTHER; note = 2'-O-methyl nucleotide
  modified_base 8: mod_base = OTHER; note = 2'Fluoro nucleotide
  modified_base 9..13: mod_base = OTHER; note = 2'-O-methyl nucleotide
  modified_base 14: mod_base = OTHER; note = 2'Fluoro nucleotide
  modified_base 15: mod_base = OTHER; note = 2'-O-methyl nucleotide
  modified_base 16: mod_base = OTHER; note = 2'Fluoro nucleotide
  modified_base 17..23: mod_base = OTHER; note = 2'-O-methyl nucleotide
tcagacaagaaagtgcccatttg

SEQ ID NO: 625 - DNA, 23 bp, synthetic construct
  source 1..23: mol_type = other DNA
  modified_base 1: mod_base = OTHER; note = inverted deoxyribonucleotide
  modified_base 2..6: mod_base = OTHER; note = 2'-O-methyl nucleotide
  modified_base 1..3: mod_base = OTHER; note = Phosphorothioate linkage
  modified_base 7: mod_base = OTHER; note = 2'Fluoro nucleotide
  modified_base 8: mod_base = OTHER; note = 2'-O-methyl nucleotide
  modified_base 9..11: mod_base = OTHER; note = 2'Fluoro nucleotide
  modified_base 12: mod_base = OTHER; note = 2'-O-methyl nucleotide
  modified_base 13: mod_base = OTHER; note = 2'Fluoro nucleotide
  modified_base 14..23: mod_base = OTHER; note = 2'-O-methyl nucleotide
  modified_base 21..23: mod_base = OTHER; note = Phosphorothioate linkage
  misc_feature 1: note = DNA
  misc_feature 2..23: note = RNA
tactctttgcttgaggatctttt

SEQ ID NO: 626 - DNA, 23 bp, synthetic construct
  source 1..23: mol_type = other DNA
  modified_base 1: mod_base = OTHER; note = inverted deoxyribonucleotide
  modified_base 2..6: mod_base = OTHER; note = 2'-O-methyl nucleotide
  modified_base 1..3: mod_base = OTHER; note = Phosphorothioate linkage
  modified_base 7: mod_base = OTHER; note = 2'Fluoro nucleotide
  modified_base 8: mod_base = OTHER; note = 2'-O-methyl nucleotide
  modified_base 9..11: mod_base = OTHER; note = 2'Fluoro nucleotide
  modified_base 12: mod_base = OTHER; note = 2'-O-methyl nucleotide
  modified_base 13: mod_base = OTHER; note = 2'Fluoro nucleotide
  modified_base 14..17: mod_base = OTHER; note = 2'-O-methyl nucleotide
  modified_base 18: mod_base = OTHER; note = TNA analog with a uracil base
  modified_base 19..22: mod_base = OTHER; note = 2'-O-methyl nucleotide
  modified_base 23: mod_base = OTHER; note = nucleotide with a modified sugar and a uracil base
  modified_base 21..23: mod_base = OTHER; note = Phosphorothioate linkage
  misc_feature 1: note = DNA
  misc_feature 2..23: note = RNA
tactctttgcttgaggatctttt

SEQ ID NO: 627 - RNA, 23 nt, synthetic construct
  source 1..23: mol_type = other RNA
  modified_base 1: mod_base = OTHER; note = inverted deoxyribonucleotide
  modified_base 2..6: mod_base = OTHER; note = 2'-O-methyl nucleotide
  modified_base 1..3: mod_base = OTHER; note = Phosphorothioate linkage
  modified_base 7: mod_base = OTHER; note = 2'Fluoro nucleotide
  modified_base 8: mod_base = OTHER; note = 2'-O-methyl nucleotide
  modified_base 9..11: mod_base = OTHER; note = 2'Fluoro nucleotide
  modified_base 12: mod_base = OTHER; note = 2'-O-methyl nucleotide
  modified_base 13: mod_base = OTHER; note = 2'Fluoro nucleotide
  modified_base 14..23: mod_base = OTHER; note = 2'-O-methyl nucleotide
  modified_base 21..23: mod_base = OTHER; note = Phosphorothioate linkage
  misc_feature 1: note = DNA
  misc_feature 2..23: note = RNA
tacaagcatttatactttctttt

SEQ ID NO: 628 - DNA, 23 bp, synthetic construct
  source 1..23: mol_type = other DNA
  modified_base 1: mod_base = OTHER; note = inverted deoxyribonucleotide
  modified_base 2..6: mod_base = OTHER; note = 2'-O-methyl nucleotide
  modified_base 1..3: mod_base = OTHER; note = Phosphorothioate linkage
  modified_base 7: mod_base = OTHER; note = 2'Fluoro nucleotide
  modified_base 8: mod_base = OTHER; note = 2'-O-methyl nucleotide
  modified_base 9..11: mod_base = OTHER; note = 2'Fluoro nucleotide
  modified_base 12: mod_base = OTHER; note = 2'-O-methyl nucleotide
  modified_base 13: mod_base = OTHER; note = 2'Fluoro nucleotide
  modified_base 14..17: mod_base = OTHER; note = 2'-O-methyl nucleotide
  modified_base 18: mod_base = OTHER; note = nucleotide with a modified sugar and a uracil base
  modified_base 19..22: mod_base = OTHER; note = 2'-O-methyl nucleotide
  modified_base 23: mod_base = OTHER; note = nucleotide with a modified sugar and a uracil base
  modified_base 21..23: mod_base = OTHER; note = Phosphorothioate linkage
  misc_feature 1: note = DNA
  misc_feature 2..23: note = RNA
tacaagcatttatactttctttt

SEQ ID NO: 629 - DNA, 23 bp, synthetic construct
  source 1..23: mol_type = other DNA
  modified_base 1: mod_base = OTHER; note = inverted deoxyribonucleotide
  modified_base 2..6: mod_base = OTHER; note = 2'-O-methyl nucleotide
  modified_base 1..3: mod_base = OTHER; note = Phosphorothioate linkage
  modified_base 7: mod_base = OTHER; note = 2'Fluoro nucleotide
  modified_base 8: mod_base = OTHER; note = 2'-O-methyl nucleotide
  modified_base 9..11: mod_base = OTHER; note = 2'Fluoro nucleotide
  modified_base 12: mod_base = OTHER; note = 2'-O-methyl nucleotide
  modified_base 13: mod_base = OTHER; note = 2'Fluoro nucleotide
  modified_base 14..23: mod_base = OTHER; note = 2'-O-methyl nucleotide
  misc_feature 1: note = DNA
  misc_feature 2..23: note = RNA
tggcttatactttcttaataatt

SEQ ID NO: 630 - RNA, 20 nt, synthetic construct
  source 1..20: mol_type = other RNA
  modified_base 1..5: mod_base = OTHER; note = 2'-O-methyl nucleotide
  modified_base 1..3: mod_base = OTHER; note = Phosphorothioate linkage
  modified_base 6: mod_base = OTHER; note = 2'Fluoro nucleotide
  modified_base 7: mod_base = OTHER; note = 2'-O-methyl nucleotide
  modified_base 8..10: mod_base = OTHER; note = 2'Fluoro nucleotide
  modified_base 11: mod_base = OTHER; note = 2'-O-methyl nucleotide
  modified_base 12: mod_base = OTHER; note = 2'Fluoro nucleotide
  modified_base 13..20: mod_base = OTHER; note = 2'-O-methyl nucleotide
ggcttatactttcttaataa

SEQ ID NO: 631 - RNA, 21 nt, synthetic construct
  source 1..21: mol_type = other RNA
  modified_base 1: mod_base = OTHER; note = 2'Fluoro nucleotide
  modified_base 2..6: mod_base = OTHER; note = 2'-O-methyl nucleotide
  modified_base 1..3: mod_base = OTHER; note = Phosphorothioate linkage
  modified_base 7: mod_base = OTHER; note = 2'Fluoro nucleotide
  modified_base 8: mod_base = OTHER; note = 2'-O-methyl nucleotide
  modified_base 9..11: mod_base = OTHER; note = 2'Fluoro nucleotide
  modified_base 12..21: mod_base = OTHER; note = 2'-O-methyl nucleotide
ctgtcacagactccacttcat

SEQ ID NO: 632 - RNA, 23 nt, synthetic construct
  source 1..23: mol_type = other RNA
  modified_base 1: mod_base = OTHER; note = 2'-O-methyl nucleotide
  modified_base 2: mod_base = OTHER; note = 2'Fluoro nucleotide
  modified_base 3: mod_base = OTHER; note = 2'-O-methyl nucleotide
  modified_base 1..3: mod_base = OTHER; note = Phosphorothioate linkage
  modified_base 4: mod_base = OTHER; note = 2'Fluoro nucleotide
  modified_base 5: mod_base = OTHER; note = 2'-O-methyl nucleotide
  modified_base 6: mod_base = OTHER; note = 2'Fluoro nucleotide
  modified_base 7: mod_base = OTHER; note = 2'-O-methyl nucleotide
  modified_base 8: mod_base = OTHER; note = 2'Fluoro nucleotide
  modified_base 9..13: mod_base = OTHER; note = 2'-O-methyl nucleotide
  modified_base 14: mod_base = OTHER; note = 2'Fluoro nucleotide
  modified_base 15: mod_base = OTHER; note = 2'-O-methyl nucleotide
  modified_base 16: mod_base = OTHER; note = 2'Fluoro nucleotide
  modified_base 17..23: mod_base = OTHER; note = 2'-O-methyl nucleotide
  modified_base 21..23: mod_base = OTHER; note = Phosphorothioate linkage
aagatcctcaagcaaagagtgcc

SEQ ID NO: 633 - RNA, 23 nt, synthetic construct
  source 1..23: mol_type = other RNA
  modified_base 1: mod_base = OTHER; note = 2'-O-methyl nucleotide
  modified_base 2: mod_base = OTHER; note = 2'Fluoro nucleotide
  modified_base 3: mod_base = OTHER; note = 2'-O-methyl nucleotide
  modified_base 1..3: mod_base = OTHER; note = Phosphorothioate linkage
  modified_base 4: mod_base = OTHER; note = 2'Fluoro nucleotide
  modified_base 5: mod_base = OTHER; note = 2'-O-methyl nucleotide
  modified_base 6: mod_base = OTHER; note = 2'Fluoro nucleotide
  modified_base 7: mod_base = OTHER; note = 2'-O-methyl nucleotide
  modified_base 8: mod_base = OTHER; note = 2'Fluoro nucleotide
  modified_base 9..13: mod_base = OTHER; note = 2'-O-methyl nucleotide
  modified_base 14: mod_base = OTHER; note = 2'Fluoro nucleotide
  modified_base 15: mod_base = OTHER; note = 2'-O-methyl nucleotide
  modified_base 16: mod_base = OTHER; note = 2'Fluoro nucleotide
  modified_base 17..23: mod_base = OTHER; note = 2'-O-methyl nucleotide
  modified_base 21..23: mod_base = OTHER; note = Phosphorothioate linkage
aagatcctcaagcaaagagtgcc

SEQ ID NO: 634 - RNA, 23 nt, synthetic construct
  source 1..23: mol_type = other RNA
  modified_base 1: mod_base = OTHER; note = 2'-O-methyl nucleotide
  modified_base 2: mod_base = OTHER; note = 2'Fluoro nucleotide
  modified_base 3..5: mod_base = OTHER; note = 2'-O-methyl nucleotide
  modified_base 1..3: mod_base = OTHER; note = Phosphorothioate linkage
  modified_base 6: mod_base = OTHER; note = 2'Fluoro nucleotide
  modified_base 7: mod_base = OTHER; note = 2'-O-methyl nucleotide
  modified_base 8: mod_base = OTHER; note = 2'Fluoro nucleotide
  modified_base 9..13: mod_base = OTHER; note = 2'-O-methyl nucleotide
  modified_base 14: mod_base = OTHER; note = 2'Fluoro nucleotide
  modified_base 15..23: mod_base = OTHER; note = 2'-O-methyl nucleotide
  modified_base 21..23: mod_base = OTHER; note = Phosphorothioate linkage
aagaaagtataaatgcttgtctc

SEQ ID NO: 635 - RNA, 23 nt, synthetic construct
  source 1..23: mol_type = other RNA
  modified_base 1: mod_base = OTHER; note = 2'-O-methyl nucleotide
  modified_base 2: mod_base = OTHER; note = 2'Fluoro nucleotide
  modified_base 3..5: mod_base = OTHER; note = 2'-O-methyl nucleotide
  modified_base 1..3: mod_base = OTHER; note = Phosphorothioate linkage
  modified_base 6: mod_base = OTHER; note = 2'Fluoro nucleotide
  modified_base 7: mod_base = OTHER; note = 2'-O-methyl nucleotide
  modified_base 8: mod_base = OTHER; note = 2'Fluoro nucleotide
  modified_base 9..13: mod_base = OTHER; note = 2'-O-methyl nucleotide
  modified_base 14: mod_base = OTHER; note = 2'Fluoro nucleotide
  modified_base 15..23: mod_base = OTHER; note = 2'-O-methyl nucleotide
  modified_base 21..23: mod_base = OTHER; note = Phosphorothioate linkage
aagaaagtataaatgcttgtctc

SEQ ID NO: 636 - RNA, 23 nt, synthetic construct
  source 1..23: mol_type = other RNA
  modified_base 1: mod_base = OTHER; note = 2'-O-methyl nucleotide
  modified_base 2: mod_base = OTHER; note = 2'Fluoro nucleotide
  modified_base 3: mod_base = OTHER; note = 2'-O-methyl nucleotide
  modified_base 1..3: mod_base = OTHER; note = Phosphorothioate linkage
  modified_base 4: mod_base = OTHER; note = 2'Fluoro nucleotide
  modified_base 5: mod_base = OTHER; note = 2'-O-methyl nucleotide
  modified_base 6: mod_base = OTHER; note = 2'Fluoro nucleotide
  modified_base 7: mod_base = OTHER; note = 2'-O-methyl nucleotide
  modified_base 8: mod_base = OTHER; note = 2'Fluoro nucleotide
  modified_base 9..13: mod_base = OTHER; note = 2'-O-methyl nucleotide
  modified_base 14: mod_base = OTHER; note = 2'Fluoro nucleotide
  modified_base 15: mod_base = OTHER; note = 2'-O-methyl nucleotide
  modified_base 16: mod_base = OTHER; note = 2'Fluoro nucleotide
  modified_base 17..23: mod_base = OTHER; note = 2'-O-methyl nucleotide
  modified_base 21..23: mod_base = OTHER; note = Phosphorothioate linkage
ttattaagaaagtataagccagg

SEQ ID NO: 637 - RNA, 23 nt, synthetic construct
  source 1..23: mol_type = other RNA
  modified_base 1: mod_base = OTHER; note = 2'-O-methyl nucleotide
  modified_base 2: mod_base = OTHER; note = 2'Fluoro nucleotide
  modified_base 3: mod_base = OTHER; note = 2'-O-methyl nucleotide
  modified_base 1..3: mod_base = OTHER; note = Phosphorothioate linkage
  modified_base 4: mod_base = OTHER; note = 2'Fluoro nucleotide
  modified_base 5: mod_base = OTHER; note = 2'-O-methyl nucleotide
  modified_base 6: mod_base = OTHER; note = 2'Fluoro nucleotide
  modified_base 7: mod_base = OTHER; note = 2'-O-methyl nucleotide
  modified_base 8: mod_base = OTHER; note = 2'Fluoro nucleotide
  modified_base 9..13: mod_base = OTHER; note = 2'-O-methyl nucleotide
  modified_base 14: mod_base = OTHER; note = 2'Fluoro nucleotide
  modified_base 15: mod_base = OTHER; note = 2'-O-methyl nucleotide
  modified_base 16: mod_base = OTHER; note = 2'Fluoro nucleotide
  modified_base 17..18: mod_base = OTHER; note = 2'-O-methyl nucleotide
  modified_base 19: mod_base = OTHER; note = nucleotide with a modified sugar and a cytosine base
  modified_base 20..23: mod_base = OTHER; note = 2'-O-methyl nucleotide
  modified_base 21..23: mod_base = OTHER; note = Phosphorothioate linkage
ttattaagaaagtataagccagg

SEQ ID NO: 638 - DNA, 23 bp, synthetic construct
  source 1..23: mol_type = other DNA
  modified_base 1..2: mod_base = OTHER; note = 2'Fluoro nucleotide
  modified_base 3..4: mod_base = OTHER; note = 2'-O-methyl nucleotide
  modified_base 1..3: mod_base = OTHER; note = Phosphorothioate linkage
  modified_base 6: mod_base = OTHER; note = 2'-O-methyl nucleotide
  modified_base 7: mod_base = OTHER; note = thymidine-glycol nucleic acid
  modified_base 8..13: mod_base = OTHER; note = 2'-O-methyl nucleotide
  modified_base 14: mod_base = OTHER; note = 2'Fluoro nucleotide
  modified_base 15: mod_base = OTHER; note = 2'-O-methyl nucleotide
  modified_base 16: mod_base = OTHER; note = 2'Fluoro nucleotide
  modified_base 17..23: mod_base = OTHER; note = 2'-O-methyl nucleotide
  modified_base 21..23: mod_base = OTHER; note = Phosphorothioate linkage
  misc_feature 1..4: note = RNA
  misc_feature 5: note = DNA
  misc_feature 6..23: note = RNA
atgaagnggagtctgtgacagta

SEQ ID NO: 639 - DNA, 23 bp, synthetic construct
  source 1..23: mol_type = other DNA
  misc_feature 1: note = DNA
  misc_feature 2..23: note = RNA
tactctttgcttgaggatctttt

SEQ ID NO: 640 - DNA, 23 bp, synthetic construct
  source 1..23: mol_type = other DNA
  misc_feature 1: note = DNA
  misc_feature 2..23: note = RNA
tactctttgcttgaggatctttt

SEQ ID NO: 641 - DNA, 23 bp, synthetic construct
  source 1..23: mol_type = other DNA
  misc_feature 1: note = DNA
  misc_feature 2..23: note = RNA
tacaagcatttatactttctttt

SEQ ID NO: 642 - DNA, 23 bp, synthetic construct
  source 1..23: mol_type = other DNA
  misc_feature 1: note = DNA
  misc_feature 2..23: note = RNA
tacaagcatttatactttctttt

SEQ ID NO: 643 - DNA, 23 bp, synthetic construct
  source 1..23: mol_type = other DNA
  misc_feature 1: note = DNA
  misc_feature 2..23: note = RNA
tggcttatactttcttaataatt

SEQ ID NO: 644 - RNA, 20 nt, synthetic construct
  source 1..20: mol_type = other RNA
ggcttatactttcttaataa

SEQ ID NO: 645 - RNA, 21 nt, synthetic construct
  source 1..21: mol_type = other RNA
ctgtcacagactccacttcat

SEQ ID NO: 646 - RNA, 23 nt, synthetic construct
  source 1..23: mol_type = other RNA
aagatcctcaagcaaagagtgcc

SEQ ID NO: 647 - RNA, 23 nt, synthetic construct
  source 1..23: mol_type = other RNA
aagatcctcaagcaaagagtgcc

SEQ ID NO: 648 - RNA, 23 nt, synthetic construct
  source 1..23: mol_type = other RNA
aagaaagtataaatgcttgtctc

SEQ ID NO: 649 - RNA, 23 nt, synthetic construct
  source 1..23: mol_type = other RNA
aagaaagtataaatgcttgtctc

SEQ ID NO: 650 - RNA, 23 nt, synthetic construct
  source 1..23: mol_type = other RNA
ttattaagaaagtataagccagg

SEQ ID NO: 651 - RNA, 23 nt, synthetic construct
  source 1..23: mol_type = other RNA
ttattaagaaagtataagccagg

SEQ ID NO: 652 - DNA, 23 bp, synthetic construct
  source 1..23: mol_type = other DNA
  misc_feature 1..6: note = RNA
  misc_feature 7: note = DNA
  misc_feature 8..23: note = RNA
atgaagtggagtctgtgacagta

SEQ ID NO: 653 - RNA, 21 nt, synthetic construct
  source 1..21: mol_type = other RNA
  modified_base 1..6: mod_base = OTHER; note = 2'-O-methyl nucleotide
  modified_base 1..3: mod_base = OTHER; note = Phosphorothioate linkage
  modified_base 7: mod_base = OTHER; note = 2'Fluoro nucleotide
  modified_base 8: mod_base = OTHER; note = 2'-O-methyl nucleotide
  modified_base 9..11: mod_base = OTHER; note = 2'Fluoro nucleotide
  modified_base 12..21: mod_base = OTHER; note = 2'-O-methyl nucleotide
tggcttatactttcttaataa

SEQ ID NO: 654 - RNA, 21 nt, synthetic construct
  source 1..21: mol_type = other RNA
  modified_base 1..6: mod_base = OTHER; note = 2'-O-methyl nucleotide
  modified_base 1..3: mod_base = OTHER; note = Phosphorothioate linkage
  modified_base 7: mod_base = OTHER; note = 2'Fluoro nucleotide
  modified_base 8: mod_base = OTHER; note = 2'-O-methyl nucleotide
  modified_base 9..11: mod_base = OTHER; note = 2'Fluoro nucleotide
  modified_base 12..21: mod_base = OTHER; note = 2'-O-methyl nucleotide
ttggagtgaagagaccaagat

SEQ ID NO: 655 - RNA, 21 nt, synthetic construct
  source 1..21: mol_type = other RNA
  modified_base 1..6: mod_base = OTHER; note = 2'-O-methyl nucleotide
  modified_base 1..3: mod_base = OTHER; note = Phosphorothioate linkage
  modified_base 7: mod_base = OTHER; note = 2'Fluoro nucleotide
  modified_base 8: mod_base = OTHER; note = 2'-O-methyl nucleotide
  modified_base 9..11: mod_base = OTHER; note = 2'Fluoro nucleotide
  modified_base 12..21: mod_base = OTHER; note = 2'-O-methyl nucleotide
tctttccattctgccgtcttc

SEQ ID NO: 656 - RNA, 21 nt, synthetic construct
  source 1..21: mol_type = other RNA
  modified_base 1..6: mod_base = OTHER; note = 2'-O-methyl nucleotide
  modified_base 1..3: mod_base = OTHER; note = Phosphorothioate linkage
  modified_base 7: mod_base = OTHER; note = 2'Fluoro nucleotide
  modified_base 8: mod_base = OTHER; note = 2'-O-methyl nucleotide
  modified_base 9..11: mod_base = OTHER; note = 2'Fluoro nucleotide
  modified_base 12..21: mod_base = OTHER; note = 2'-O-methyl nucleotide
ggagacaagcatttatacttt

SEQ ID NO: 657 - RNA, 21 nt, synthetic construct
  source 1..21: mol_type = other RNA
  modified_base 1..6: mod_base = OTHER; note = 2'-O-methyl nucleotide
  modified_base 1..3: mod_base = OTHER; note = Phosphorothioate linkage
  modified_base 7: mod_base = OTHER; note = 2'Fluoro nucleotide
  modified_base 8: mod_base = OTHER; note = 2'-O-methyl nucleotide
  modified_base 9..11: mod_base = OTHER; note = 2'Fluoro nucleotide
  modified_base 12..21: mod_base = OTHER; note = 2'-O-methyl nucleotide
gagacaagcatttatactttc

SEQ ID NO: 658 - RNA, 21 nt, synthetic construct
  source 1..21: mol_type = other RNA
  modified_base 1..6: mod_base = OTHER; note = 2'-O-methyl nucleotide
  modified_base 1..3: mod_base = OTHER; note = Phosphorothioate linkage
  modified_base 7: mod_base = OTHER; note = 2'Fluoro nucleotide
  modified_base 8: mod_base = OTHER; note = 2'-O-methyl nucleotide
  modified_base 9..11: mod_base = OTHER; note = 2'Fluoro nucleotide
  modified_base 12..21: mod_base = OTHER; note = 2'-O-methyl nucleotide
agagaccaagatgaagtttcc

SEQ ID NO: 659 - RNA, 21 nt, synthetic construct
  source 1..21: mol_type = other RNA
  modified_base 1..6: mod_base = OTHER; note = 2'-O-methyl nucleotide
  modified_base 1..3: mod_base = OTHER; note = Phosphorothioate linkage
  modified_base 7: mod_base = OTHER; note = 2'Fluoro nucleotide
  modified_base 8: mod_base = OTHER; note = 2'-O-methyl nucleotide
  modified_base 9..11: mod_base = OTHER; note = 2'Fluoro nucleotide
  modified_base 12..21: mod_base = OTHER; note = 2'-O-methyl nucleotide
aagaagttccctggtttttcc

SEQ ID NO: 660 - RNA, 23 nt, synthetic construct
  source 1..23: mol_type = other RNA
  modified_base 1: mod_base = OTHER; note = 2'-O-methyl nucleotide
  modified_base 2: mod_base = OTHER; note = 2'Fluoro nucleotide
  modified_base 3..5: mod_base = OTHER; note = 2'-O-methyl nucleotide
  modified_base 1..3: mod_base = OTHER; note = Phosphorothioate linkage
  modified_base 6: mod_base = OTHER; note = 2'Fluoro nucleotide
  modified_base 7: mod_base = OTHER; note = 2'-O-methyl nucleotide
  modified_base 8..9: mod_base = OTHER; note = 2'Fluoro nucleotide
  modified_base 10..13: mod_base = OTHER; note = 2'-O-methyl nucleotide
  modified_base 14: mod_base = OTHER; note = 2'Fluoro nucleotide
  modified_base 15: mod_base = OTHER; note = 2'-O-methyl nucleotide
  modified_base 16: mod_base = OTHER; note = 2'Fluoro nucleotide
  modified_base 17..23: mod_base = OTHER; note = 2'-O-methyl nucleotide
  modified_base 21..23: mod_base = OTHER; note = Phosphorothioate linkage
ttattaagaaagtataagccagg

SEQ ID NO: 661 - RNA, 23 nt, synthetic construct
  source 1..23: mol_type = other RNA
  modified_base 1: mod_base = OTHER; note = 2'-O-methyl nucleotide
  modified_base 2: mod_base = OTHER; note = 2'Fluoro nucleotide
  modified_base 3: mod_base = OTHER; note = 2'-O-methyl nucleotide
  modified_base 1..3: mod_base = OTHER; note = Phosphorothioate linkage
  modified_base 4: mod_base = OTHER; note = 2'Fluoro nucleotide
  modified_base 5: mod_base = OTHER; note = 2'-O-methyl nucleotide
  modified_base 6: mod_base = OTHER; note = 2'Fluoro nucleotide
  modified_base 7: mod_base = OTHER; note = 2'-O-methyl nucleotide
  modified_base 8: mod_base = OTHER; note = 2'Fluoro nucleotide
  modified_base 9..13: mod_base = OTHER; note = 2'-O-methyl nucleotide
  modified_base 14: mod_base = OTHER; note = 2'Fluoro nucleotide
  modified_base 15: mod_base = OTHER; note = 2'-O-methyl nucleotide
  modified_base 16: mod_base = OTHER; note = 2'Fluoro nucleotide
  modified_base 17..23: mod_base = OTHER; note = 2'-O-methyl nucleotide
ttcttggtctcttcactccaaag

SEQ ID NO: 662 - RNA, 23 nt, synthetic construct
  source 1..23: mol_type = other RNA
  modified_base 1: mod_base = OTHER; note = 2'-O-methyl nucleotide
  modified_base 2: mod_base = OTHER; note = 2'Fluoro nucleotide
  modified_base 3: mod_base = OTHER; note = 2'-O-methyl nucleotide
  modified_base 1..3: mod_base = OTHER; note = Phosphorothioate linkage
  modified_base 4: mod_base = OTHER; note = 2'Fluoro nucleotide
  modified_base 5: mod_base = OTHER; note = 2'-O-methyl nucleotide
  modified_base 6: mod_base = OTHER; note = 2'Fluoro nucleotide
  modified_base 7: mod_base = OTHER; note = 2'-O-methyl nucleotide
  modified_base 8: mod_base = OTHER; note = 2'Fluoro nucleotide
  modified_base 9..13: mod_base = OTHER; note = 2'-O-methyl nucleotide
  modified_base 14: mod_base = OTHER; note = 2'Fluoro nucleotide
  modified_base 15: mod_base = OTHER; note = 2'-O-methyl nucleotide
  modified_base 16: mod_base = OTHER; note = 2'Fluoro nucleotide
  modified_base 17..23: mod_base = OTHER; note = 2'-O-methyl nucleotide
taagacggcagaatggaaagagg

SEQ ID NO: 663 - RNA, 23 nt, synthetic construct
  source 1..23: mol_type = other RNA
  modified_base 1: mod_base = OTHER; note = 2'-O-methyl nucleotide
  modified_base 2: mod_base = OTHER; note = 2'Fluoro nucleotide
  modified_base 3: mod_base = OTHER; note = 2'-O-methyl nucleotide
  modified_base 1..3: mod_base = OTHER; note = Phosphorothioate linkage
  modified_base 4: mod_base = OTHER; note = 2'Fluoro nucleotide
  modified_base 5: mod_base = OTHER; note = 2'-O-methyl nucleotide
  modified_base 6: mod_base = OTHER; note = 2'Fluoro nucleotide
  modified_base 7: mod_base = OTHER; note = 2'-O-methyl nucleotide
  modified_base 8: mod_base = OTHER; note = 2'Fluoro nucleotide
  modified_base 9..13: mod_base = OTHER; note = 2'-O-methyl nucleotide
  modified_base 14: mod_base = OTHER; note = 2'Fluoro nucleotide
  modified_base 15: mod_base = OTHER; note = 2'-O-methyl nucleotide
  modified_base 16: mod_base = OTHER; note = 2'Fluoro nucleotide
  modified_base 17..23: mod_base = OTHER; note = 2'-O-methyl nucleotide
taagtataaatgcttgtctccca

SEQ ID NO: 664 - RNA, 23 nt, synthetic construct
  source 1..23: mol_type = other RNA
  modified_base 1: mod_base = OTHER; note = 2'-O-methyl nucleotide
  modified_base 2: mod_base = OTHER; note = 2'Fluoro nucleotide
  modified_base 3: mod_base = OTHER; note = 2'-O-methyl nucleotide
  modified_base 1..3: mod_base = OTHER; note = Phosphorothioate linkage
  modified_base 4: mod_base = OTHER; note = 2'Fluoro nucleotide
  modified_base 5: mod_base = OTHER; note = 2'-O-methyl nucleotide
  modified_base 6: mod_base = OTHER; note = 2'Fluoro nucleotide
  modified_base 7: mod_base = OTHER; note = 2'-O-methyl nucleotide
  modified_base 8: mod_base = OTHER; note = 2'Fluoro nucleotide
  modified_base 9..13: mod_base = OTHER; note = 2'-O-methyl nucleotide
  modified_base 14: mod_base = OTHER; note = 2'Fluoro nucleotide
  modified_base 15: mod_base = OTHER; note = 2'-O-methyl nucleotide
  modified_base 16: mod_base = OTHER; note = 2'Fluoro nucleotide
  modified_base 17..23: mod_base = OTHER; note = 2'-O-methyl nucleotide
taaagtataaatgcttgtctccc

SEQ ID NO: 665 - RNA, 23 nt, synthetic construct
  source 1..23: mol_type = other RNA
  modified_base 1: mod_base = OTHER; note = 2'-O-methyl nucleotide
  modified_base 2: mod_base = OTHER; note = 2'Fluoro nucleotide
  modified_base 3: mod_base = OTHER; note = 2'-O-methyl nucleotide
  modified_base 1..3: mod_base = OTHER; note = Phosphorothioate linkage
  modified_base 4: mod_base = OTHER; note = 2'Fluoro nucleotide
  modified_base 5: mod_base = OTHER; note = 2'-O-methyl nucleotide
  modified_base 6: mod_base = OTHER; note = 2'Fluoro nucleotide
  modified_base 7: mod_base = OTHER; note = 2'-O-methyl nucleotide
  modified_base 8: mod_base = OTHER; note = 2'Fluoro nucleotide
  modified_base 9..23: mod_base = OTHER; note = 2'-O-methyl nucleotide
tgaaacttcatcttggtctcttc

SEQ ID NO: 666 - RNA, 23 nt, synthetic construct
  source 1..23: mol_type = other RNA
  modified_base 1: mod_base = OTHER; note = 2'-O-methyl nucleotide
  modified_base 2: mod_base = OTHER; note = 2'Fluoro nucleotide
  modified_base 3: mod_base = OTHER; note = 2'-O-methyl nucleotide
  modified_base 1..3: mod_base = OTHER; note = Phosphorothioate linkage
  modified_base 4: mod_base = OTHER; note = 2'Fluoro nucleotide
  modified_base 5: mod_base = OTHER; note = 2'-O-methyl nucleotide
  modified_base 6: mod_base = OTHER; note = 2'Fluoro nucleotide
  modified_base 7: mod_base = OTHER; note = 2'-O-methyl nucleotide
  modified_base 8: mod_base = OTHER; note = 2'Fluoro nucleotide
  modified_base 9..13: mod_base = OTHER; note = 2'-O-methyl nucleotide
  modified_base 14: mod_base = OTHER; note = 2'Fluoro nucleotide
  modified_base 15: mod_base = OTHER; note = 2'-O-methyl nucleotide
  modified_base 16: mod_base = OTHER; note = 2'Fluoro nucleotide
  modified_base 17..23: mod_base = OTHER; note = 2'-O-methyl nucleotide
tgaaaaaccagggaacttcttag

SEQ ID NO: 667 - RNA, 21 nt, synthetic construct
  source 1..21: mol_type = other RNA
tggcttatactttcttaataa

SEQ ID NO: 668 - RNA, 21 nt, synthetic construct
  source 1..21: mol_type = other RNA
ttggagtgaagagaccaagat

SEQ ID NO: 669 - RNA, 23 nt, synthetic construct
  source 1..23: mol_type = other RNA
atggatagctgtgcttgaccctc

SEQ ID NO: 670 - RNA, 21 nt, synthetic construct
  source 1..21: mol_type = other RNA
tctttccattctgccgtcttc

SEQ ID NO: 671 - RNA, 21 nt, synthetic construct
  source 1..21: mol_type = other RNA
ggagacaagcatttatacttt

SEQ ID NO: 672 - RNA, 21 nt, synthetic construct
  source 1..21: mol_type = other RNA
gagacaagcatttatactttc

SEQ ID NO: 673 - RNA, 21 nt, synthetic construct
  source 1..21: mol_type = other RNA
agagaccaagatgaagtttcc

SEQ ID NO: 674 - RNA, 21 nt, synthetic construct
  source 1..21: mol_type = other RNA
aagaagttccctggtttttcc

SEQ ID NO: 675 - RNA, 23 nt, synthetic construct
  source 1..23: mol_type = other RNA
ttattaagaaagtataagccagg

SEQ ID NO: 676 - RNA, 23 nt, synthetic construct
  source 1..23: mol_type = other RNA
ttcttggtctcttcactccaaag

SEQ ID NO: 677 - RNA, 23 nt, synthetic construct
  source 1..23: mol_type = other RNA
taagacggcagaatggaaagagg

SEQ ID NO: 678 - RNA, 23 nt, synthetic construct
  source 1..23: mol_type = other RNA
taagtataaatgcttgtctccca

SEQ ID NO: 679 - RNA, 23 nt, synthetic construct
  source 1..23: mol_type = other RNA
taaagtataaatgcttgtctccc

SEQ ID NO: 680 - RNA, 23 nt, synthetic construct
  source 1..23: mol_type = other RNA
tgaaacttcatcttggtctcttc

SEQ ID NO: 681 - RNA, 23 nt, synthetic construct
  source 1..23: mol_type = other RNA
tgaaaaaccagggaacttcttag
